(19) United States
(12) Patent Application Publication
(10) Pub. No.: US 2021/0338804 A1
(43) Pub. Date: Nov. 4, 2021

(54) Vaccine Compositions For Preventing Coronavirus Disease

(71) Applicants: International AIDS Vaccine Initiative Inc., New York, NY (US); Merck Sharp & Dohme Corp., Rahway, NJ (US)

(72) Inventors: Christopher Lee Parks, Boonton, NJ (US); Maoli Yuan, Brooklyn, NY (US); Mark Feinberg, New York, NY (US); Amy Espeseth, Chalfont, PA (US); Andrew J. Bett, West Point, PA (US)

(73) Assignees: International AIDS Vaccine Initiative Inc., New York, NY (US); Merck Sharp & Dohme Corp., Rahway, NJ (US)

(21) Appl. No.: 17/180,147

(22) Filed: Feb. 19, 2021

Related U.S. Application Data
(60) Provisional application No. 63/143,522, filed on Jan. 29, 2021.
(60) Provisional application No. 63/079,944, filed on Sep. 17, 2020.
(60) Provisional application No. 63/005,717, filed on Apr. 6, 2020.
(60) Provisional application No. 62/989,128, filed on Mar. 13, 2020.
(60) Provisional application No. 62/979,949, filed on Feb. 21, 2020.

(51) Int. Cl. A61K 39/215; C12N 7/00; C07K 14/165; C07K 14/145; C12N 15/86

(52) U.S. Cl. CPC A61K 39/215; C12N 7/00; C07K 14/165; A61K 2039/542; C12N 15/86; C12N 2760/20234; C12N 2760/20243; C07K 14/145

(57) ABSTRACT

The present disclosure provides Severe Acute Respiratory Syndrome coronavirus 2 (SARS-CoV-2) vaccines, recombinant vesicular stomatitis virus (VSV) vectors encoding the SARS-CoV-2 spike (S) protein or an immunogenic variant thereof, recombinant replicable VSV particles having a SARS-CoV-2 S protein or an immunogenic variant thereof on the surface of the particles, and immunogenic recombinant proteins comprising a SARS-CoV-2 S protein or a variant thereof. Immunogenic compositions comprising the SARS-CoV-2 vaccines, the recombinant VSV vectors, the recombinant replicable VSV particles and/or the immunogenic recombinant proteins may be used for inducing an immune response to the SARS-CoV-2, preventing infection by the SARS-CoV-2, vaccinating against the SARS-CoV-2 and/or producing adaptive mutants of the recombinant replicable VSV particles.

### GOVERNMENT RIGHTS IN INVENTION

[0001] This invention was made with Government support under HHSO100201600031C awarded by Assistant Secretary of Preparedness and Response, Biomedical Advanced Research and Development Authority (ASPR-BARDA). The Government has certain rights in the invention.

### FIELD

[0002] The present disclosure relates to recombinant vesicular stomatitis virus (VSV) for use as vaccines for infectious coronavirus disease COVID-19.

### BACKGROUND

[0003] The recent outbreak of coronavirus disease COVID-19 is caused by a novel coronavirus 2019-nCoV, which is officially named Severe Acute Respiratory Syndrome coronavirus 2 (SARS-CoV-2) and sometimes referred to as the Wuhan coronavirus. Since the report of the first COVID-19 case in Wuhan, China, in November 2019, 27.9 million COVID-19 cases have been confirmed globally with more than 898,000 reported deaths as of Sep. 10, 2020. As a member of the large coronavirus family that causes sickness from the common cold to more severe diseases such as the Severe Acute Respiratory Syndrome (SARS) and the Middle East Respiratory Syndrome (MERS), the SARS-CoV-2 is a coronavirus that was not found in humans before this outbreak. Although infection with SARS-CoV-2 does not appear to be as deadly, with respect to case fatality rate, as infection with the SARS or MERS viruses, SARS-CoV-2 appears to be more infectious and able to be transmitted from infected people before the onset of symptoms. As a result, it is spreading far wider and more quickly than SARS or MERS and, as a result, is now responsible for the deaths of far more people worldwide. Some scientists have predicted that the SARS-CoV-2 may become endemic in human populations and potentially return every winter like other respiratory pathogens such as influenza. Many leading scientists believe that the infection will only be eradicated from human populations when a safe and effective vaccine to prevent SARS-CoV-2 infection is available.

[0004] The SARS-CoV-2 is genetically related to coronaviruses that infect bats. Like many other highly pathogenic viruses that originate from animal reservoirs, such as those that cause outbreaks of hemorrhagic fever like Ebola virus (EBOV), Lassa virus (LASV), and Marburg virus (MARV), the SARS-CoV-2 is an enveloped RNA virus. Viruses in this highly diverse category all have one or more multimeric glycoproteins exposed on their surface that play essential roles in infection of the host, notably during cell attachment and virus entry. Glycoproteins also are known to be the primary targets for protective immunity.

[0005] Sequences of more than seventy (70) SARS-CoV-2 variants have been published. Structural studies of these published sequences have been reported. It is believed that SARS-CoV-2 expresses a spike (S) protein that contains a receptor-binding domain (RBD), including receptor-binding motif (RBM), and interacts with host receptor angiotensin-converting enzyme 2 (ACE2). See Zhou, P. et al. A pneumonia outbreak associated with a new coronavirus of probable bat origin, Nature 579:270-273 (published online 3 Feb. 2020); see also Wan, Y. et al. Receptor recognition by novel coronavirus from Wuhan: An analysis based on decade-long structural studies of SARS, J. Virol. 94(7): e00127-20, doi:10.1128/JVI.00127-20 (published online 29 Jan. 2020). The S protein comprises two subunits S1 (the surface unit, which binds the receptor) and S2 (the transmembrane unit, which facilitates viral fusion to cell membranes). The S protein is activated by cleavage at the spike S1/S2 site by host cell proteases and SARS-CoV-2 has a newly formed Furin cleavage site at the S1/S2 interface.

[0006] There remains a need to identify immunogenic antigens derived from the SARS-CoV-2 and develop vaccine compositions that are able to be produced at large scale using available manufacturing processes that stably express such immunogenic antigens for inducing relevant immune responses in vaccinated individuals to enable them to be protected against COVID-19 and that are able to be produced at large scale using available manufacturing processes.

### SUMMARY

[0007] The present disclosure relates to vectors, virus particles, immunogenic recombinant proteins, and vaccines that relate to Severe Acute Respiratory Syndrome coronavirus 2 (SARS-CoV-2). The disclosure includes multiple embodiments, including, but not limited to, the following embodiments.

[0008] Embodiment 1 is a recombinant VSV vector comprising:
[0009] a. at least a portion of the VSV genome comprising at least a VSV-N gene, VSV-P gene, VSV-M gene, and VSV-L gene, and
[0010] b. a nucleic acid sequence encoding a SARS-CoV-2 S protein or an immunogenic variant thereof.

[0011] Embodiment 2 is a recombinant VSV particle comprising the vector of embodiment 1 and displaying the S protein or an immunogenic variant thereof on the surface of the VSV particle.

[0012] Embodiment 3 is a recombinant VSV particle comprising:
[0013] a. at least a portion of the VSV genome comprising N, P, M, and L genes and
[0014] b. a nucleic acid sequence encoding a SARS-CoV-2 S protein or an immunogenic variant thereof.

[0015] Embodiment 4 is the recombinant VSV particle of embodiment 2 or 3, wherein the VSV particle is replicable.

[0016] Embodiment 5 is the recombinant VSV particle of any one of embodiments 3-4, wherein the VSV particle displays the S protein or an immunogenic variant thereof on the surface of the VSV particle.

[0017] Embodiment 6 is an immunogenic recombinant protein comprising a SARS-CoV-2 S protein or an immunogenic variant thereof expressed by the recombinant VSV vector of embodiment 1 or recombinant VSV particle of any one of embodiments 2-5.

[0018] Embodiment 7 is an immunogenic recombinant protein comprising a SARS-CoV-2 S protein or an immunogenic variant thereof and at least a fragment of a VSV glycoprotein (G).

[0019] Embodiment 8 is a SARS-CoV-2 vaccine comprising the recombinant VSV vector of embodiment 1, recombinant VSV particle of any one of embodiments 2-5, or immunogenic recombinant protein of embodiment 6 or 7.

[0020] Embodiment 9 is the recombinant VSV vector of embodiment 1, recombinant VSV particle of any one of embodiments 2-5, immunogenic recombinant protein of embodiment 6 or 7, or SARS-CoV-2 vaccine of embodiment 8, wherein the SARS-CoV-2 S protein or an immunogenic variant thereof comprises an amino acid sequence having a length of at least 1223, 1228, 1233, 1238, 1243, 1248, 1249, 1250, 1251, 1252, 1253, 1254, 1255, 1256, 1257, 1258, 1259, 1260, 1261, 1262, 1263, 1264, 1265, 1266, 1267, 1268, 1269, 1270, 1271, 1272, 1273, 1274, 1275, 1276, 1277 or 1278 amino acids and having homology over its own length of at least 90, 91, 92, 93, 94, 95, 96, 97, 98, or 99% homology to any one of SEQ ID NOS: 1, 4, 7, 10, 13, 16, 19, 22, 25-67, 153, or 158.

[0021] Embodiment 10 is the recombinant VSV vector of embodiment 1 or 9, recombinant VSV particle of any one of embodiments 2-5 or 9, or SARS-CoV-2 vaccine of embodiment 8 or 9, wherein the VSV genome comprises at least a fragment of a VSV-G gene.

[0022] Embodiment 11 is the recombinant VSV vector of any one of embodiments 1, 9, or 10, recombinant VSV particle of any one of embodiments 2-5, 9 or 10, immunogenic recombinant protein of any one of embodiments 6, 7, or 9, or SARS-CoV-2 vaccine of any one of embodiments 8-10, wherein the immunogenic variant of the SARS-CoV-2 S protein is a fragment of the SARS-CoV-2 S protein having a deletion at the C-terminal end of the SARS-CoV-2 S protein.

[0023] Embodiment 12 is the recombinant VSV vector of any one of embodiments 1, or 9-11, recombinant VSV particle of any one of embodiments 2-5 or 9-11, immunogenic recombinant protein of any one of embodiments 6, 7, 9, or 11, or SARS-CoV-2 vaccine of any one of embodiments 8-11, wherein the immunogenic variant of the SARS-CoV-2 S protein comprises a fragment of the SARS-CoV-2 S protein having a deletion of from 5-25 or 9-23 amino acids at the C-terminal end of the SARS-CoV-2 S protein.

[0024] Embodiment 13 is the recombinant VSV vector of any one of embodiments 1, or 9-12, recombinant VSV particle of any one of embodiments 2-5 or 9-12, immunogenic recombinant protein of any one of embodiments 6, 7, 9, 11, or 12, or SARS-CoV-2 vaccine of any one of embodiments 8-12, wherein the immunogenic variant of the SARS-CoV-2 S protein comprises a fragment of the SARS-CoV-2 S protein having a deletion of 9, 13, 19, 21 or 23 amino acids at the C-terminal end of the SARS-CoV-2 S protein.

[0025] Embodiment 14 is the recombinant VSV vector of any one of embodiments 1 or 9-13, recombinant VSV particle of any one of embodiments 2-5 or 9-13, immunogenic recombinant protein of any one of embodiments 6, 7, 9, or 11-13, or SARS-CoV-2 vaccine of any one of embodiments 8-13, wherein (a) the portion of the VSV genome comprises a nucleic acid sequence encoding at least 21 amino acids at the C-terminal end of the VSV-G protein or (b) the immunogenic recombinant protein comprises at least 21 amino acids at the C-terminal end of the VSV-G protein.

[0026] Embodiment 15 is the recombinant VSV vector of any one of embodiments 1 or 9-14, recombinant VSV particle of any one of embodiments 2-5 or 9-14, immunogenic recombinant protein of any one of embodiments 6, 7, 9, or 11-14, or SARS-CoV-2 vaccine of any one of embodiments 8-14, wherein (a) the portion of the VSV genome comprises a nucleic acid sequence encoding at least 29 amino acids at the C-terminal end of the VSV-G protein or (b) the immunogenic recombinant protein comprises at least 29 amino acids at the C-terminal end of the VSV-G protein.

[0027] Embodiment 16 is the recombinant VSV vector of any one of embodiments 1 or 9-15, recombinant VSV particle of any one of embodiments 2-5 or 9-15, immunogenic recombinant protein of any one of embodiments 6, 7, 9, or 11-15, or SARS-CoV-2 vaccine of any one of embodiments 8-15, wherein the immunogenic variant of the SARS-CoV-2 S protein comprises at least one mutation in the exposed loop (a solvent-exposed loop that comprises the S1/S2 cleavage site) of the SARS-CoV-2 S protein.

[0028] Embodiment 17 is the recombinant VSV vector of any one of embodiments 1 or 9-16, recombinant VSV particle of any one of embodiments 2-5 or 9-16, immunogenic recombinant protein of any one of embodiments 6, 7, 9, or 11-16, or SARS-CoV-2 vaccine of any one of embodiments 8-16, wherein the immunogenic variant of the SARS-CoV-2 S protein comprises at least one mutation in the S1/S2 cleavage site (Furin).

[0029] Embodiment 18 is the recombinant VSV vector, recombinant VSV particle, immunogenic recombinant protein, or SARS-CoV-2 vaccine of embodiment 17, wherein the at least one mutation in the S1/S2 cleavage site (Furin) reduces or blocks S1/S2 cleavage of the immunogenic variant of the SARS-CoV-2 S protein as compared with that of wild-type SARS-CoV-2 S protein.

[0030] Embodiment 19 is the recombinant VSV vector of any one of embodiments 1 or 9-16, recombinant VSV particle of any one of embodiments 2-5 or 9-16, immunogenic recombinant protein of any one of embodiments 6, 7, 9, or 11-16, or SARS-CoV-2 vaccine of any one of embodiments 8-16, wherein the immunogenic variant of the SARS-CoV-2 protein comprises at least one mutation in the S2′ cleavage site (Cathepsin H, L).

[0031] Embodiment 20 is the recombinant VSV vector, recombinant VSV particle, immunogenic recombinant protein, or SARS-CoV-2 vaccine of embodiment 19, wherein the at least one mutation in the S2′ cleavage site (Cathepsin H, L) modulates S2′ cleavage of the immunogenic variant of the SARS-CoV-2 S protein as compared with that of wild-type SARS-CoV-2 S S2′.

[0032] Embodiment 21 is the recombinant VSV vector of any one of embodiments 1 or 9-20, recombinant VSV particle of any one of embodiments 2-5 or 9-20, immunogenic recombinant protein of any one of embodiments 6, 7, 9, or 11-20, or SARS-CoV-2 vaccine of any one of embodiments 8-20, wherein the immunogenic variant of the SARS-CoV-2 protein comprises one or more mutations relative to SEQ ID NO: 1 chosen from a mutation at residue 655, one or more mutations from residue 672 to residue 687, one or more mutations from residue 802 to residue 817, one or more mutations from residue 1233 to residue 1273, and combinations thereof.

[0033] Embodiment 22 is the recombinant VSV vector, recombinant VSV particle, immunogenic recombinant protein, or SARS-CoV-2 vaccine of embodiment 21, comprising a mutation at residues 655, wherein the mutation at residue 655 is H655Y.

[0034] Embodiment 23 is the recombinant VSV vector, recombinant VSV particle, immunogenic recombinant protein, or SARS-CoV-2 vaccine of embodiment 21 or 22, comprising one or more mutations from residue 672 to 687, wherein the one or more mutations from residue 672 to residue 687 are from residue 678 to residue 685.

[0035] Embodiment 24 is the recombinant VSV vector, recombinant VSV particle, immunogenic recombinant protein, or SARS-CoV-2 vaccine of any one of embodiments 21-23, comprising one or more mutations from residue 672 to residue 687, wherein the one or more mutations from residue 678 to residue 685 are chosen from T678I, P681S, R682K, R683G, R685G, and combinations thereof.

[0036] Embodiment 25 is the recombinant VSV vector, recombinant VSV particle, immunogenic recombinant protein, or SARS-CoV-2 vaccine of any one of embodiments 21-24, comprising one more mutations from residue 802 to residue 817, wherein the one or more mutations from residue 802 to residue 817 in SEQ ID NO: 1 are from residue 810 to residue 815.

[0037] Embodiment 26 is the recombinant VSV vector, recombinant VSV particle, immunogenic recombinant protein, or SARS-CoV-2 vaccine of any one of embodiments 21-25, comprising one or more mutations from residue 810 to residue 815, wherein the one or more mutations from residue 810 to residue 815 are chosen from P812R, S813R, S813F, and combinations thereof.

[0038] Embodiment 27 is the recombinant VSV vector of embodiment 1 or 9, recombinant VSV particle of any one of embodiments 2-5 or 9, or SARS-CoV-2 vaccine of embodiment 8 or 9, wherein:
[0039] a. the recombinant VSV vector is rVSVΔG-SARS-CoV-2 clone MB2, which has the nucleic acid sequence set forth in SEQ ID NO: 154; or
[0040] b. the recombinant VSV vector, recombinant VSV particle, or SARS-CoV-2 vaccine comprises nucleic acids encoding
   [0041] i. a VSV L protein, which has the amino acid sequence set forth in SEQ ID NO: 152;
   [0042] ii. a VSV N protein, which has the amino acid sequence set forth in SEQ ID NO: 155;
   [0043] iii. a VSV P protein, which has the amino acid sequence set forth in SEQ ID NO: 156;
   [0044] iv. a VSV M protein, which has the amino acid sequences set forth in SEQ ID NO: 157; and
   [0045] v. a SARS-CoV-2 S protein, which has the amino acid sequence set forth in SEQ ID NO: 158.

[0046] Embodiment 28 is the recombinant VSV particle of any one of embodiments 2-5 or 9 or SARS-CoV-2 vaccine of embodiment 8 or 9, wherein the particle or vaccine comprises:
[0047] a. VSV L protein, which has the amino acid sequence set forth in SEQ ID NO: 152;
[0048] b. VSV N protein, which has the amino acid sequence set forth in SEQ ID NO: 155;
[0049] c. VSV P protein, which has the amino acid sequence set forth in SEQ ID NO: 156;
[0050] d. VSV M protein, which has the amino acid sequence set forth in SEQ ID NO: 157; and
[0051] e. SARS-CoV-2 S protein, which has the amino acid sequence set forth in SEQ ID NO: 158.

[0052] Embodiment 29 is the recombinant VSV vector of any one of embodiments 1, or 9-26, recombinant VSV particle of any one of embodiments 2-5 or 9-26, immunogenic recombinant protein of any one of embodiments 6, 7, 9, or 11-26, or SARS-CoV-2 vaccine of any one of embodiments 8-26, wherein the immunogenic variant of the S protein does not comprise the entire cytoplasmic tail.

[0053] Embodiment 30 is the recombinant VSV vector of any one of embodiments 1, 9-26, or 29, recombinant VSV particle of any one of embodiments 2-5, 9-26, or 29, immunogenic recombinant protein of any one of embodiments 6, 7, 9, 11-26, or 29, or SARS-CoV-2 vaccine of any one of embodiments 8-26 or 29, wherein the immunogenic variant of the S protein does not comprise the endoplasmic reticulum retention sequence.

[0054] Embodiment 31 is the recombinant VSV vector of any one of embodiments 1, 9-26, 29, or 30, recombinant VSV particle of any one of embodiments 2-5, 9-26, 29, or 30, immunogenic recombinant protein of any one of embodiments 6, 7, 9, 11-26, 29, or 30, or SARS-CoV-2 vaccine of any one of embodiments 8-26, 29, or 30, wherein the immunogenic variant of the S protein has a 23 amino acid deletion at the C-terminal domain relative to SEQ ID NO: 1.

[0055] Embodiment 32 is the recombinant VSV vector of any one of embodiments 1, 9-26, or 29-31, recombinant VSV particle of any one of embodiments 2-5, 9-26, or 29-31, immunogenic recombinant protein of any one of embodiments 6, 7, 9, 11-26, or 29-31, or SARS-CoV-2 vaccine of any one of embodiments 8-26 or 29-31, wherein the immunogenic variant of the S protein has a deletion at position 1251 relative to SEQ ID NO: 1.

[0056] Embodiment 33 is the recombinant VSV vector of any one of embodiments 1, 9-26, or 29-32, recombinant VSV particle of any one of embodiments 2-5, 9-26, or 29-32, immunogenic recombinant protein of any one of embodiments 6, 7, 9, 11-26, or 29-32, or SARS-CoV-2 vaccine of any one of embodiments 8-26 or 29-32, wherein the immunogenic variant of the S protein comprises an H655Y mutation relative to SEQ ID NO: 1.

[0057] Embodiment 34 is the recombinant VSV vector of any one of embodiments 1, 9-26, or 29-33, recombinant VSV particle of any one of embodiments 2-5, 9-26, or 29-33, immunogenic recombinant protein of any one of embodiments 6, 7, 9, 11-26, or 29-33, or SARS-CoV-2 vaccine of any one of embodiments 8-26 or 29-33, wherein the immunogenic variant of the SARS-CoV-2 S protein comprises one or more mutations from residue 1233 to residue 1273 in SEQ ID NO: 1, wherein the one or more mutations from residue 1233 to residue 1273 are chosen from a deletion at the C-terminal end of the SEQ ID NO: 1, M1233K, and a combination thereof.

[0058] Embodiment 35 is the recombinant VSV vector of claim 1 or 9, recombinant VSV particle of any one of claims 2-5 or 9, or SARS-CoV-2 vaccine of claim 8 or 9, wherein:
[0059] a. the recombinant VSV vector is rVSVΔG-SARS-CoV-2 clone MB1, which has the nucleic acid sequence set forth in SEQ ID NO: 150; or
[0060] b. the recombinant VSV vector, recombinant VSV particle, or SARS-CoV-2 vaccine comprises nucleic acids encoding
   [0061] i. VSV L protein, which has the amino acid sequence set forth in SEQ ID NO: 152;
   [0062] ii. VSV N protein, which has the amino acid sequence set forth in SEQ ID NO: 155;
   [0063] iii. VSV P protein, which has the amino acid sequence set forth in SEQ ID NO: 156;
   [0064] iv. VSV M protein, which has the amino acid sequence set forth in SEQ ID NO: 153; and
   [0065] v. SARS-CoV-2 S protein, which has the amino acid sequence set forth in SEQ ID NO: 151.

[0066] Embodiment 36 is the recombinant VSV particle of any one of claims 2-5 or 9 or SARS-CoV-2 vaccine of claim 8 or 9, wherein the particle or vaccine comprises VSV and SARS-CoV-2 proteins from MB1 comprising:
[0067] a. VSV L protein, which has the amino acid sequence set forth in SEQ ID NO: 152;
[0068] b. VSV N protein, which has the amino acid sequence set forth in SEQ ID NO: 155;
[0069] c. VSV P protein, which has the amino acid sequence set forth in SEQ ID NO: 156;
[0070] d. VSV M protein, which has the amino acid sequence set forth in SEQ ID NO: 151; and
[0071] e. SARS-CoV-2 S protein, which has the amino acid sequence set forth in SEQ ID NO: 153.

[0072] Embodiment 37 is the recombinant VSV vector of any one of embodiments 1, 9-28, or 30-34, recombinant VSV particle of any one of embodiments 2-5, 9-28, or 30-34, immunogenic recombinant protein of any one of embodiments 6, 7, 9, 11-28, or 30-34, or SARS-CoV-2 vaccine of any one of embodiments 8-28 or 30-34, wherein the immunogenic variant of the S protein does not comprise the entire cytoplasmic tail (i.e., does not comprise the entire cytoplasmic tail of the S protein).

[0073] Embodiment 38 is the recombinant VSV vector of any one of embodiments 1, 9-29, 31-34, or 37, recombinant VSV particle of any one of embodiments 2-5, 9-29, 31-34, or 37, immunogenic recombinant protein of any one of embodiments 6, 7, 9, 11-29, 31-34, or 37, or SARS-CoV-2 vaccine of any one of embodiments 8-29, 31-34, or 37, wherein the immunogenic variant of the S protein does not comprise the endoplasmic reticulum retention sequence (i.e., does not comprise the endoplasmic reticulum retention sequence of the SARS-CoV-2 S protein).

[0074] Embodiment 39 is the recombinant VSV vector of any one of embodiments 1, 9-30, 32-34, 37, or 38, recombinant VSV particle of any one of embodiments 2-5, 9-30, 32-34, 37, or 38, immunogenic recombinant protein of any one of embodiments 6, 7, 9, 11-30, 32-34, 37, or 38, or SARS-CoV-2 vaccine of any one of embodiments 8-30, 32-34, 37, or 38, wherein the immunogenic variant of the S protein has a 23 amino acid deletion at the C-terminal domain.

[0075] Embodiment 40 is the recombinant VSV vector of any one of embodiments 1, 9-31, 33, 34, or 37-39, recombinant VSV particle of any one of embodiments 2-5, 9-31, 33, 34, or 37-39, immunogenic recombinant protein of any one of embodiments 6, 7, 9, 11-31, 33, 34, or 37-39, or SARS-CoV-2 vaccine of any one of embodiments 8-31, 33, 34, or 37-39, wherein the immunogenic variant of the S protein has a deletion at position 1251.

[0076] Embodiment 41 is the recombinant VSV vector of any one of embodiments 1, 9-34, or 37-40, recombinant VSV particle of any one of embodiments 2-5, 9-34, or 37-40, immunogenic recombinant protein of any one of embodiments 6, 7, 9, 11-34, or 37-40, or SARS-CoV-2 vaccine of any one of embodiments 8-34, or 37-40, wherein the immunogenic variant of the S protein comprises an R683G mutation relative to SEQ ID NO: 1.

[0077] Embodiment 42 is the recombinant VSV vector of any one of embodiments 1, 9-41, recombinant VSV particle of any one of embodiments 2-5, 9-41, immunogenic recombinant protein of any one of embodiments 6, 7, 9, 11-41, or SARS-CoV-2 vaccine of any one of embodiments 8-41, wherein the immunogenic variant of the S protein does not comprise a mutation at R685 relative to SEQ ID NO: 1.

[0078] Embodiment 43 is the recombinant VSV vector of any one of embodiments 1, 9-42, recombinant VSV particle of any one of embodiments 2-5, 9-42, immunogenic recombinant protein of any one of embodiments 6, 7, 9, 11-42, or SARS-CoV-2 vaccine of any one of embodiments 8-42, wherein the immunogenic variant of the S protein does not have a 24 amino acid deletion at the C-terminal domain.

[0079] Embodiment 44 is the recombinant VSV vector of any one of embodiments 1, 9-42, recombinant VSV particle of any one of embodiments 2-5, 9-42, immunogenic recombinant protein of any one of embodiments 6, 7, 9, 11-42, or SARS-CoV-2 vaccine of any one of embodiments 8-42, wherein the immunogenic variant of the S protein does not comprise a 21 amino acid deletion at the C-terminal cytoplasmic domain.

[0080] Embodiment 45 is the recombinant VSV vector of any one of embodiments 1, 9-44, recombinant VSV particle of any one of embodiments 2-5, 9-44, immunogenic recombinant protein of any one of embodiments 6, 7, 9, 11-44, or SARS-CoV-2 vaccine of any one of embodiments 8-44, wherein the immunogenic variant of the S protein has at least one mutation relative to SEQ ID NO: 1 along the length of the immunogenic variant.

[0081] Embodiment 46 is the recombinant VSV vector of any one of embodiments 1, 9-45, recombinant VSV particle of any one of embodiments 2-5, 9-45, immunogenic recombinant protein of any one of embodiments 6, 7, 9, 11-45, or SARS-CoV-2 vaccine of any one of embodiments 8-45, wherein the immunogenic variant of the S protein comprises an S813F mutation relative to SEQ ID NO: 1.

[0082] Embodiment 47 is the recombinant VSV vector of any one of embodiments 1, 9-34, or 37-46, recombinant VSV particle of any one of embodiments 2-5, 9-34, or 37-46, immunogenic recombinant protein of any one of embodiments 6, 7, 9, 11-34, or 37-46, or SARS-CoV-2 vaccine of any one of embodiments 8-34 or 37-46, wherein the VSV-M protein comprises a Y61S mutation relative to SEQ ID NO: 1.

[0083] Embodiment 48 is the recombinant VSV vector of any one of embodiments 1 or 9-47, recombinant VSV particle of any one of embodiments 2-5 or 9-47, immunogenic recombinant protein of any one of embodiments 6, 7, 9, or 11-47, or SARS-CoV-2 vaccine of any one of embodiments 8-47, wherein the immunogenic variant of the SARS-CoV-2 S protein comprises at least one of the following mutations (either in isolation or in any combination): H655Y, R682K, R683G, N709S, S813F, N978K, S940G, D1118A, or D1163N relative to SEQ ID NO: 1.

[0084] Embodiment 49 is the recombinant VSV vector of any one of embodiments 1 or 9-48, recombinant VSV particle of any one of embodiments 2-5 or 9-48, immunogenic recombinant protein of any one of embodiments 6, 7, 9, or 11-48, or SARS-CoV-2 vaccine of any one of embodiments 8-48, wherein the immunogenic variant of the SARS-CoV-2 S protein comprises at least one mutation in SEQ ID NO: 1 chosen from F140V, Q321P, N715S, D1118A, and combinations thereof.

[0085] Embodiment 50 is the recombinant VSV vector of any one of embodiments 1 or 9-49, recombinant VSV particle of any one of embodiments 2-5 or 9-49, immunogenic recombinant protein of any one of embodiments 6, 7, 9, or 11-49, or SARS-CoV-2 vaccine of any one of embodiments 8-49, wherein the immunogenic variant of the SARS-CoV-2 S protein comprises one or more mutations relative to SEQ ID NO: 1 chosen from:
[0086] a. H655Y, R682K, and R685G;
[0087] b. H655Y, R682K, R685G, and a deletion of the 9 amino acids (Δ9) at the C-terminal end of the amino acid sequence of SEQ ID NO: 1;
[0088] c. H655Y, R682K, R685G, and a deletion of the 13 amino acids (Δ13) at the C-terminal end of the amino acid sequence of SEQ ID NO: 1;
[0089] d. Q321P, H655Y, T678I, and P812R;
[0090] e. Q321P, H655Y, T678I, P812R, and a deletion of the 23 amino acids (Δ23) at the C-terminal end of the amino acid sequence of SEQ ID NO: 1;
[0091] f. E154D, S115L, T678I, R685G, and M1233K;
[0092] g. R685G, S813R, and a deletion of the 9 amino acids (Δ9) at the C-terminal end of the amino acid sequence of SEQ ID NO: 1;
[0093] h. H655Y, R682K, and a deletion of the 13 amino acids (Δ13) at the C-terminal end of the amino acid sequence of SEQ ID NO: 1;
[0094] i. R685G, S813F, and a deletion of the 9 amino acids (Δ9) at the C-terminal end of the amino acid sequence of SEQ ID NO: 1;
[0095] j. R683G, S813F and a deletion of the 23 amino acids (Δ23) at the C-terminal end of the amino acid sequence of SEQ ID NO: 1;
[0096] k. R683G, S813F, R685G, and a deletion of 23 amino acids (Δ23) at the C-terminal end of the amino acid sequence of SEQ ID NO: 1;
[0097] l. H655Y, P681S, R682K, and a deletion of the 13 amino acids (Δ13) at the C-terminal end of the amino acid sequence of SEQ ID NO: 1;
[0098] m. R683G and a deletion of the 23 amino acids (Δ23) at the C-terminal end of the amino acid sequence of SEQ ID NO: 1;
[0099] n. H655Y and a deletion of the 23 amino acids (Δ23) at the C-terminal end of the amino acid sequence of SEQ ID NO: 1;
[0100] o. R683G, D1118A, and a deletion of the 23 amino acids (Δ23) at the C-terminal end of the amino acid sequence of SEQ ID NO: 1;
[0101] p. R683G, N715S, and a deletion of the 23 amino acids (Δ23) at the C-terminal end of the amino acid sequence of SEQ ID NO: 1;
[0102] q. H655Y, N709S, and a deletion of the 13 amino acids (Δ13) at the C-terminal end of the amino acid sequence of SEQ ID NO: 1;
[0103] r. F140V, H655Y, and a deletion of the 23 amino acids (Δ23) at the C-terminal end of the amino acid sequence of SEQ ID NO: 1;
[0104] s. a deletion of the 21 amino acids (Δ21) at the C-terminal end of the amino acid sequence of SEQ ID NO: 1;
[0105] t. a deletion of the 19 amino acids (Δ19) at the C-terminal end of the amino acid sequence of SEQ ID NO: 1;
[0106] u. E484D, H655Y, and a deletion of 21 amino acids (Δ21) at the C-terminal end of the amino acid sequence of SEQ ID NO: 1;
[0107] v. H665Y, R685G and a deletion of the 19 amino acids (Δ19) at the C-terminal end of the amino acid sequence of SEQ ID NO: 1, wherein the SARS-CoV-2 S protein further comprises a fragment of at least 21 amino acids at the C-terminal end of a VSV-G protein;
[0108] w. D614G; or
[0109] x. D614N.

[0110] Embodiment 51 is the recombinant VSV vector of any one of embodiments 1 or 9-50, recombinant VSV particle of any one of embodiments 2-5 or 9-50, immunogenic recombinant protein of any one of embodiments 6, 7, 9, or 11-50, or SARS-CoV-2 vaccine of any one of embodiments 8-50, wherein the VSV-G protein comprises from 21 to 29 amino acids at the C-terminal end of a VSV-G protein.

[0111] Embodiment 52 is the recombinant VSV vector of any one of embodiments 1 or 9-51, recombinant VSV particle of any one of embodiments 2-5 or 9-51, immunogenic recombinant protein of any one of embodiments 6, 7, 9, or 11-51, or SARS-CoV-2 vaccine of any one of embodiments 8-51, wherein the immunogenic variant of the SARS-CoV-2 S protein is a fragment of the SARS-CoV-2 S protein that does not comprise any of the cytoplasmic tail.

[0112] Embodiment 53 is the recombinant VSV vector of any one of embodiments 1 or 9-52, recombinant VSV particle of any one of embodiments 2-5 or 9-52, immunogenic recombinant protein of any one of embodiments 6, 7, 9, or 11-52, or SARS-CoV-2 vaccine of any one of embodiments 8-52, wherein the immunogenic variant of the SARS-CoV-2 S protein is a fragment of the SARS-CoV-2 S protein lacking a transmembrane domain of the SARS-CoV-2 S protein.

[0113] Embodiment 54 is the recombinant VSV vector of any one of embodiments 1 or 9-53, recombinant VSV particle of any one of embodiments 2-5 or 9-53, immunogenic recombinant protein of any one of embodiments 6, 7, 9, or 11-53, or SARS-CoV-2 vaccine of any one of embodiments 8-53, wherein the fragment of the VSV-G gene encodes a cytoplasmic tail of a VSV-G protein.

[0114] Embodiment 55 is the recombinant VSV vector of any one of embodiments 1 or 9-54, recombinant VSV particle of any one of embodiments 2-5 or 9-54, immunogenic recombinant protein of any one of embodiments 6, 7, 9, or 11-54, or SARS-CoV-2 vaccine of any one of embodiments 8-54, wherein the fragment of the VSV-G gene encodes a transmembrane domain of a VSV-G protein.

[0115] Embodiment 56 is the recombinant VSV vector of any one of embodiments 1 or 9-55, recombinant VSV particle of any one of embodiments 2-5 or 9-55, immunogenic recombinant protein of any one of embodiments 6, 7, 9, or 11-55, or SARS-CoV-2 vaccine of any one of embodiments 8-56, wherein the at least a portion of the VSV genome comprises the VSV-N gene, VSV-P gene, VSV-M gene, and VSV-L gene arranged in sequence from 3′ to 5′.

[0116] Embodiment 57 is the recombinant VSV vector of any one of embodiments 1 or 9-56, recombinant VSV particle of any one of embodiments 2-5 or 9-56, immunogenic recombinant protein of any one of embodiments 6, 7, 9, or 11-56, or SARS-CoV-2 vaccine of any one of embodiments 8-56, wherein the nucleic acid sequence encoding the SARS-COV-2 S protein or an immunogenic variant thereof is 3′ of the VSV-N gene.

[0117] Embodiment 58 is the recombinant VSV vector of any one of embodiments 1 or 9-57, recombinant VSV particle of any one of embodiments 2-5 or 9-57, immunogenic recombinant protein of any one of embodiments 6, 7, 9, or 11-57, or SARS-CoV-2 vaccine of any one of embodiments 8-58, wherein the nucleic acid sequence encoding the SARS-COV-2 S protein or an immunogenic variant thereof is on the 3′ end of the VSV-N gene.

[0118] Embodiment 59 is the recombinant VSV vector of any one of embodiments 1 or 9-58, recombinant VSV particle of any one of embodiments 2-5 or 9-58, immunogenic recombinant protein of any one of embodiments 6, 7, 9, or 11-58, or SARS-CoV-2 vaccine of any one of embodiments 8-58, wherein the nucleic acid sequence encoding the SARS-COV-2 S protein or an immunogenic variant thereof is between the VSV-N gene and the VSV-P gene.

[0119] Embodiment 60 is the recombinant VSV vector of any one of embodiments 1 or 9-59, recombinant VSV particle of any one of embodiments 2-5 or 9-59, immunogenic recombinant protein of any one of embodiments 6, 7, 9, or 11-59, or SARS-CoV-2 vaccine of any one of embodiments 8-59, wherein the nucleic acid sequence encoding the SARS-COV-2 S protein or an immunogenic variant thereof is between the VSV-P gene and the VSV-M gene.

[0120] Embodiment 61 is the recombinant VSV vector of any one of embodiments 1 or 9-60, recombinant VSV particle of any one of embodiments 2-5 or 9-60, immunogenic recombinant protein of any one of embodiments 6, 7, 9, or 11-60, or SARS-CoV-2 vaccine of any one of embodiments 8-60, wherein the nucleic acid sequence encoding the SARS-COV-2 S protein or an immunogenic variant thereof is between the VSV-M gene and the VSV-L gene.

[0121] Embodiment 62 is the recombinant VSV vector of any one of embodiments 1 or 9-61, recombinant VSV particle of any one of embodiments 2-5 or 9-61, immunogenic recombinant protein of any one of embodiments 6, 7, 9, or 11-61, or SARS-CoV-2 vaccine of any one of embodiments 8-61, wherein the nucleic acid sequence encoding the SARS-COV-2 S protein or an immunogenic variant thereof is 5′ of the VSV-L gene.

[0122] Embodiment 63 is the recombinant VSV vector of any one of embodiments 1 or 9-62, recombinant VSV particle of any one of embodiments 2-5 or 9-62, immunogenic recombinant protein of any one of embodiments 6, 7, 9, or 11-62, or SARS-CoV-2 vaccine of any one of embodiments 8-62, wherein the nucleic acid sequence encoding the SARS-COV-2 S protein or an immunogenic variant thereof is on the 5′ end of the VSV-L gene.

[0123] Embodiment 64 is the recombinant VSV vector of any one of embodiments 1 or 9-63, recombinant VSV particle of any one of embodiments 2-5 or 9-63, immunogenic recombinant protein of any one of embodiments 6, 7, 9, or 11-63, or SARS-CoV-2 vaccine of any one of embodiments 8-63, the VSV genome does not comprise a VSV-G gene or a fragment thereof.

[0124] Embodiment 65 is the SARS-CoV-2 vaccine of any one of embodiments 8-64, further comprising a pharmaceutically acceptable excipient.

[0125] Embodiment 66 is the SARS-CoV-2 vaccine of any one of any one of embodiments 8-65, wherein the SARS-CoV-2 vaccine is formulated for oral, sublingual, intramuscular, intradermal, subcutaneous, intranasal, intraocular, rectal, transdermal, mucosal (including, but not limited to buccal), topical, or parenteral administration.

[0126] Embodiment 67 is the SARS-CoV-2 vaccine of any one of any one of embodiments 8-65, wherein the SARS-CoV-2 vaccine is formulated for oral administration.

[0127] Embodiment 68 is the SARS-CoV-2 vaccine of any one of any one of embodiments 8-65, wherein the SARS-CoV-2 vaccine is formulated for intranasal administration.

[0128] Embodiment 69 is the SARS-CoV-2 vaccine of any one of any one of embodiments 8-65, wherein the SARS-CoV-2 vaccine is formulated for oral mucosal administration and intranasal administration.

[0129] Embodiment 70 is a method for producing a recombinant VSV particle, comprising
[0130] a. introducing the recombinant VSV vector of any one of embodiments 1 or 9-64 into cells or infecting cells with the recombinant VSV particle of any one of embodiments 2-5 or 9-64; and
[0131] b. producing a recombinant VSV particle and optionally cells producing a recombinant S protein.

[0132] Embodiment 71 is the method of embodiment 70, wherein the recombinant VSV particle produced by the cells expresses a SARS-CoV-2 S protein or an immunogenic variant thereof on its surface.

[0133] Embodiment 72 is the method of embodiment 70 or 71, further comprising purifying the recombinant VSV particle from the cells.

[0134] Embodiment 73 is the method of any one of embodiments 70-72, further comprising purifying the SARS-CoV-2 S protein or an immunogenic variant thereof from the cells.

[0135] Embodiment 74 is the method of any one of embodiments 70-73, further comprising purifying the recombinant VSV vector from the cells.

[0136] Embodiment 75 is a recombinant cell comprising the recombinant VSV vector of any one of embodiments 1 or 9-64 or the recombinant VSV particle of any one of embodiments 2-5 or 9-64.

[0137] Embodiment 76 is the method of any one of embodiments 70-74 or the recombinant cell of embodiment 75, wherein the recombinant cell is a Vero cell.

[0138] Embodiment 77 is a method of generating an immune response against SARS-CoV-2 comprising
[0139] a. administering to a subject an effective amount of the VSV vector of any one of embodiments 1 or 9-64, recombinant VSV particle of any one of embodiments 2-5 or 9-64, immunogenic recombinant protein of any one of embodiments 6, 7, 9, or 11-64, or SARS-CoV-2 vaccine of any one of embodiments 8-69; and
[0140] b. generating an immune response to SARS-CoV-2.

[0141] Embodiment 78 is the method of embodiment 77, wherein the immune response comprises a humoral response.

[0142] Embodiment 79 is the method of embodiment 77 or 78, wherein the immune response comprises a cellular antigen-specific immune response.

[0143] Embodiment 80 is the method of any one of embodiments 77-79, wherein the immune response comprises production of antibodies by the vaccinated subject that block SARS-CoV-2 infection, the method further comprising harvesting the antibodies from the vaccinated subject.

[0144] Embodiment 81 is the method of any one of embodiments 77-80, wherein the antibodies are in the form of immune serum obtained from the vaccinated subject.

[0145] Embodiment 82 is the method of any one of embodiments 77-81, wherein the antibodies are monoclonal antibodies prepared from SARS-CoV-2-specific B cells obtained from the vaccinated subject.

[0146] Embodiment 83 is the method of any one of embodiments 77-82, further comprising mixing the harvested antibodies with a pharmaceutically acceptable excipient, whereby a pharmaceutical composition is prepared.

[0147] Embodiment 84 is the method of any one of embodiments 77-83, wherein administering the recombinant VSV vector, recombinant VSV particle, immunogenic recombinant protein, or SARS-CoV-2 vaccine comprises oral, sublingual, intramuscular, intradermal, subcutaneous, intranasal, intraocular, rectal, transdermal, mucosal (including, but not limited to buccal), topical, or parenteral administration.

[0148] Embodiment 85 is the method of any one of embodiments 77-83, wherein administering the recombinant VSV vector, recombinant VSV particle, immunogenic recombinant protein, or SARS-CoV-2 vaccine comprises intranasal administration.

[0149] Embodiment 86 is the method of any one of embodiments 77-83, wherein administering the recombinant VSV vector, recombinant VSV particle, immunogenic recombinant protein, or SARS-CoV-2 vaccine comprises oral administration.

[0150] Embodiment 87 is the method of any one of embodiments 77-83, wherein administering the recombinant VSV vector, recombinant VSV particle, immunogenic recombinant protein, or SARS-CoV-2 vaccine comprises oral mucosal administration.

[0151] Embodiment 88 is the method of any one of embodiments 77-87, wherein administering occurs after the subject is exposed to SARS-CoV-2.

[0152] Embodiment 89 is the method of any one of embodiments 77-88, further comprising preventing or inhibiting binding of SARS-CoV-2 to the receptor.

[0153] Embodiment 90 is the method of any one of embodiments 77-89, wherein the subject has a pre-existing medical condition.

[0154] Embodiment 91 is the method embodiment 90, wherein the pre-existing medical condition is chosen from asthma, blood or bone marrow transplant, cancer, cardiomyopathy, cerebrovascular disease, chronic kidney disease, chronic obstructive pulmonary disease, coronary artery disease, cystic fibrosis, diabetes (including type 1 diabetes mellitus and type 2 diabetes mellitus), heart disease, heart failure, HIV, hypertension (high blood pressure), immune deficiency, immunocompromised state from solid organ transplant, liver disease, lung disease, neurologic conditions, obesity, pregnancy, pulmonary fibrosis, sickle cell disease, smoking, thalassemia, use of corticosteroids, use of immune weakening medicines, and combinations thereof.

[0155] Embodiment 92 is the method of any one of embodiments 77-91, wherein a single dose of the VSV vector, recombinant VSV particle, immunogenic recombinant protein, or SARS-CoV-2 vaccine is administered.

[0156] Embodiment 93 is the method of any one of embodiments 77-92, wherein two or more doses of the VSV vector, recombinant VSV particle, immunogenic recombinant protein, or SARS-CoV-2 vaccine is administered.

[0157] Embodiment 94 is the method of any one of embodiments 77-93, wherein the dose of the VSV vector, recombinant VSV particle, immunogenic recombinant protein, or SARS-CoV-2 vaccine ranges from 1.0×10⁶ to 3.8×10⁸.

[0158] Embodiment 95 is the method of any one of embodiments 77-94, wherein the dose of the VSV vector, recombinant VSV particle, immunogenic recombinant protein, or SARS-CoV-2 vaccine is 1.0×10⁶, 3.8×10⁶, 1.5×10⁷, 5.6×10⁷, or 3.8×10⁸.

[0159] Embodiment 96 is the method of any one of embodiments 77-94, wherein the dose of the VSV vector, recombinant VSV particle, immunogenic recombinant protein, or SARS-CoV-2 vaccine is 5.0×10⁵, 2.4×10⁶, 1.15×10⁷, or 5.55×10⁷.

[0160] Embodiment 97 is the method of any one of embodiments 77-94, wherein the dose of the VSV vector, recombinant VSV particle, immunogenic recombinant protein, or SARS-CoV-2 vaccine is from 1.0×10⁶ to 3.8×10⁸, from 1.0×10⁶ to 5.0×10⁷, or from 2.0×10⁶ to 2.0×10⁷.

### DESCRIPTION OF THE SEQUENCES

[0161] Table 1 provides a listing of certain sequences referenced herein. All sequences are written either N-to-C terminus or 5′ to 3′, for protein and nucleic acid sequences, respectively.

TABLE 1
Description of the Sequences

| | | | SEQ |
|---|---|---|---|
| | | | ID |
| Description | Sequences | | NO |
| Construct 1: wt S protein | Please see FIG. 1A | | 1 |
| amino acid sequence | | | |
| Construct 1: nucleotide | Please see FIG. 1B | | 2 |
| sequence of wt S protein | | | |
| to be added to Vector A | | | |
| Construct 1: nucleotide | Please see FIG. 1C | | 3 |
| sequence of wt S protein | | | |
| to be added to Vector B | | | |
| Construct 2: S protein | Please see FIG. 1D | | 4 |
| with CT deletion | | | |
| Construct 2: nucleotide | Please see FIG. 1E | | 5 |
| sequence of S protein | | | |
| with CT deletion to be | | | |
| added to Vector A | | | |
| Construct 2: nucleotide | Please see FIG. 1F | | 6 |
| sequence of S protein | | | |
| with CT deletion to be | | | |
| added to Vector B | | | |
| Construct 3: S protein with | Please see FIG. 1G | | 7 |
| VSVG-CT IND serotype | | | |
| Construct 3: nucleotide | Please see FIG. 1H | | 8 |
| sequence of S protein with | | | |
| VSVG-CT IND serotype to be | | | |
| added to Vector A | | | |
| Construct 3: nucleotide | Please see FIG. 1I | | 9 |
| sequence of S protein with | | | |
| VSVG-CT IND serotype to | | | |
| Vector B | | | |
| Construct 4: S protein with | Please see FIG. 1J | | 10 |
| VSVG-TM-CT IND serotype | | | |
| Construct 4: nucleotide | Please see FIG. 1K | | 11 |
| sequence of S protein with | | | |
| VSVG-TM-CT IND serotype | | | |
| to be added to Vector A | | | |
| Construct 4: nucleotide | Please see FIG. 1L | | 12 |
| sequence of S protein with | | | |
| VSVG-TM-CT IND serotype | | | |
| to be added to Vector B | | | |
| Construct 5: S protein with | Please see FIG. 1M | | 13 |
| MPER6aa and VSVG-TM-CT | | | |
| IND serotype | | | |
| Construct 5: | Please see FIG. 1N | | 14 |
| nucleotide sequence | | | |
| of S protein with MPER6aa | | | |
| and VSVG-TM-CT IND serotype | | | |
| To be added to Vector A | | | |
| Construct 5: | Please see FIG. 1O | | 15 |
| nucleotide sequence | | | |
| of S protein with MPER6aa | | | |
| and VSVG-TM-CT IND serotype | | | |
| To be added to Vector B | | | |
| Construct 6: S protein with | Please see FIG. 1P | | 16 |
| dCt21 | | | |
| Construct 6: Nucleotide | Please see FIG. 1Q | | 17 |
| sequence of S protein with | | | |
| dCt21 to be added Vector A | | | |
| Construct 6: Nucleotide | Please see FIG. 1R | | 18 |
| sequence of S protein with | | | |
| dCt21 to be added Vector B | | | |
| Construct 7: S protein with | Please see FIG. 1S | | 19 |
| dCt19 and VSVGct | | | |
| Construct 7: Nucleotide | Please see FIG. 1T | | 20 |
| sequence of S protein with | | | |
| dCt19 and VSGct to be added | | | |
| Vector A | | | |
| Construct 7: Nucleotide | Please see FIG. 1U | | 21 |
| sequence of S protein with | | | |
| dCt19 and VSGct to be added | | | |
| Vector B | | | |
| Construct 8: S protein with | Please see FIG. 1V | | 22 |
| dCt19 and VSVGct21 | | | |
| Construct 8: Nucleotide | Please see FIG. 1W | | 23 |
| sequence of S protein with | | | |
| dCt19 and VSGct21 to be | | | |
| added Vector A | | | |
| Construct 8: Nucleotide | Please see FIG. 1X | | 24 |
| sequence of S protein with | | | |
| dCt19 and VSGct21 to be | | | |
| added Vector B | | | |
| gb_QHW06059 (a full-length | Please see FIG. 2 | | 25 |
| SARS-CoV-2 S protein amino | | | |
| acid variant sequence) | | | |
| gb_QHZ00379 (a full-length | Please see FIG. 2 | | 26 |
| SARS-CoV-2 S protein amino | | | |
| acid variant sequence) | | | |
| gb_QHR84449 (a full-length | Please see FIG. 2 | | 27 |
| SARS-CoV-2 S protein amino | | | |
| acid variant sequence) | | | |
| gb_QIA20044 (a full-length | Please see FIG. 2 | | 28 |
| SARS-CoV-2 S protein amino | | | |
| acid variant sequence) | | | |
| gb_QHZ00358 (a full-length | Please see FIG. 2 | | 29 |
| SARS-CoV-2 S protein amino | | | |
| acid variant sequence) | | | |
| dbj_BCA25664 (a full-length | Please see FIG. 2 | | 30 |
| SARS-CoV-2 S protein amino | | | |
| acid variant sequence) | | | |
| gb_QHZ87582 (a full-length | Please see FIG. 2 | | 31 |
| SARS-CoV-2 S protein amino | | | |
| acid variant sequence) | | | |
| dbj_BCA25674 (a full-length | Please see FIG. 2 | | 32 |
| SARS-CoV-2 S protein amino | | | |
| acid variant sequence) | | | |
| gb_QHZ00389 (a full-length | Please see FIG. 2 | | 33 |
| SARS-CoV-2 S protein amino | | | |
| acid variant sequence) | | | |
| gb_QHZ87592 (a full-length | Please see FIG. 2 | | 34 |
| SARS-CoV-2 S protein amino | | | |
| acid variant sequence) | | | |
| gb_QIB84673 (a full-length | Please see FIG. 2 | | 35 |
| SARS-CoV-2 S protein amino | | | |
| acid variant sequence) | | | |
| gb_QHR63260 (a full-length | Please see FIG. 2 | | 36 |
| SARS-CoV-2 S protein amino | | | |
| acid variant sequence) | | | |
| gb_QIA98606 (a full-length | Please see FIG. 2 | | 37 |
| SARS-CoV-2 S protein amino | | | |
| acid variant sequence) | | | |
| gb_QIA98596 (a full-length | Please see FIG. 2 | | 38 |
| SARS-CoV-2 S protein amino | | | |
| acid variant sequence) | | | |
| gb_QHR63250 (a full-length | Please see FIG. 2 | | 39 |
| SARS-CoV-2 S protein amino | | | |
| acid variant sequence) | | | |
| gb_QHR63280 (a full-length | Please see FIG. 2 | | 40 |
| SARS-CoV-2 S protein amino | | | |
| acid variant sequence) | | | |
| gb_QHR63290 (a full-length | Please see FIG. 2 | | 41 |
| SARS-CoV-2 S protein amino | | | |
| acid variant sequence) | | | |
| gb_QHR63270 (a full-length | Please see FIG. 2 | | 42 |
| SARS-CoV-2 S protein amino | | | |
| acid variant sequence) | | | |
| gb_QHZ00399 (a full-length | Please see FIG. 2 | | 43 |
| SARS-CoV-2 S protein amino | | | |
| acid variant sequence) | | | |
| dbj_BCA25644 (a full-length | Please see FIG. 2 | | 44 |
| SARS-CoV-2 S protein amino | | | |
| acid variant sequence) | | | |
| dbj_BCA25654 (a full-length | Please see FIG. 2 | | 45 |
| SARS-CoV-2 S protein amino | | | |
| acid variant sequence) | | | |
| gb_QHO62877 (a full-length | Please see FIG. 2 | | 46 |
| SARS-CoV-2 S protein amino | | | |
| acid variant sequence) | | | |
| ref_YP_00972439 | Please see FIG. 2 | | 47 |
| (a full-length | | | |
| SARS-CoV-2 S protein amino | | | |
| acid variant sequence) | | | |
| gb_QHW06039 (a full-length | Please see FIG. 2 | | 48 |
| SARS-CoV-2 S protein amino | | | |
| acid variant sequence) | | | |
| gb_QHO62112 (a full-length | Please see FIG. 2 | | 49 |
| SARS-CoV-2 S protein amino | | | |
| acid variant sequence) | | | |
| gb_QHQ71973 (a full-length | Please see FIG. 2 | | 50 |
| SARS-CoV-2 S protein amino | | | |
| acid variant sequence) | | | |
| gb_QHW06049 (a full-length | Please see FIG. 2 | | 51 |
| SARS-CoV-2 S protein amino | | | |
| acid variant sequence) | | | |
| gb_QHO60594 (a full-length | Please see FIG. 2 | | 52 |
| SARS-CoV-2 S protein amino | | | |
| acid variant sequence) | | | |
| gb_QHN73810 (a full-length | Please see FIG. 2 | | 53 |
| SARS-CoV-2 S protein amino | | | |
| acid variant sequence) | | | |
| gb_QHO62107 (a full-length | Please see FIG. 2 | | 54 |
| SARS-CoV-2 S protein amino | | | |
| acid variant sequence) | | | |
| gb_QHQ82464 (a full-length | Please see FIG. 2 | | 55 |
| SARS-CoV-2 S protein amino | | | |
| acid variant sequence) | | | |
| dbj_BBW89517 (a full-length | Please see FIG. 2 | | 56 |
| SARS-CoV-2 S protein amino | | | |
| acid variant sequence) | | | |
| gb_QHU79204 (a full-length | Please see FIG. 2 | | 57 |
| SARS-CoV-2 S protein amino | | | |
| acid variant sequence) | | | |
| gb_QHQ71963 (a full-length | Please see FIG. 2 | | 58 |
| SARS-CoV-2 S protein amino | | | |
| acid variant sequence) | | | |
| gb_QHU79194 (a full-length | Please see FIG. 2 | | 59 |
| SARS-CoV-2 S protein amino | | | |
| acid variant sequence) | | | |
| gb_QHN73795 (a full-length | Please see FIG. 2 | | 60 |
| SARS-CoV-2 S protein amino | | | |
| acid variant sequence) | | | |
| gb_QHU36864 (a full-length | Please see FIG. 2 | | 61 |
| SARS-CoV-2 S protein amino | | | |
| acid variant sequence) | | | |
| gb_QHD43416 (a full-length | Please see FIG. 2 | | 62 |
| SARS-CoV-2 S protein amino | | | |
| acid variant sequence) | | | |
| gb_QHU36854 (a full-length | Please see FIG. 2 | | 63 |
| SARS-CoV-2 S protein amino | | | |
| acid variant sequence) | | | |
| gb_QHU36844 (a full-length | Please see FIG. 2 | | 64 |
| SARS-CoV-2 S protein amino | | | |
| acid variant sequence) | | | |
| gb_QHU36834 (a full-length | Please see FIG. 2 | | 65 |
| SARS-CoV-2 S protein amino | | | |
| acid variant sequence) | | | |
| gb_QHU36824 (a full-length | Please see FIG. 2 | | 66 |
| SARS-CoV-2 S protein amino | | | |
| acid variant sequence) | | | |
| Consensus sequence | Please see FIG. 2 | | 67 |
| 1gVSVLeader_f (primer used | ACGAAGACAAACAAACCATTATTATCATTAAAAGG | | 68 |
| for the Sanger sequencing of | | | |
| the rVSVΔG-SARS-CoV-2 | | | |
| genome) | | | |
| 2gVSV_400f (primer used for | AGCAGGGGATACAATCGGAATA | | 69 |
| the Sanger sequencing of the | | | |
| rVSVΔG-SARS-CoV-2 genome) | | | |
| 3gVSV_800f (primer used for | CACCTCTGCAAAATAACCGGAA | | 70 |
| the Sanger sequencing of the | | | |
| rVSVΔG-SARS-CoV-2 genome) | | | |
| 4gVSV_1200f (primer used for | GCAGAGATGTGGTCGAATGGC | | 71 |
| the Sanger sequencing of the | | | |
| rVSVΔG-SARS-CoV-2 genome) | | | |
| 5gVSV_1600f (primer used for | TGAAGGCTTTATACAGGGGC | | 72 |
| the Sanger sequencing of the | | | |
| rVSVΔG-SARS-CoV-2 genome) | | | |
| 6gVSV_200r (primer used for | TGGTAGACATATCCTCTTAG | | 73 |
| the Sanger sequencing of the | | | |
| rVSVΔG-SARS-CoV-2 genome) | | | |
| 7gVSV_400r (primer used for | GCTGGTTCTGGAAGCATCCG | | 74 |
| the Sanger sequencing of the | | | |
| rVSVΔG-SARS-CoV-2 genome) | | | |
| 8gVSV_800r (primer used for | CTGGAAGCATCATTTGGACCATTT | | 75 |
| the Sanger sequencing of the | | | |
| rVSVΔG-SARS-CoV-2 genome) | | | |
| 9gVSV_1200r (primer used for | GCTCTTTTCGCATACTGCATCATA | | 76 |
| the Sanger sequencing of the | | | |
| rVSVΔG-SARS-CoV-2 genome) | | | |
| 10gVSV_1600r (primer used for | CCACTTCCTCATCTGCATAGTCAT | | 77 |
| the Sanger sequencing of the | | | |
| rVSVΔG-SARS-CoV-2 genome) | | | |
| 11gVSV_1200f (primer used for | GCAGAGATGTGGTCGAATGGC | | 78 |
| the Sanger sequencing of the | | | |
| rVSVΔG-SARS-CoV-2 genome) | | | |
| 12gVSV_1600f (primer used for | TGAAGGCTTTATACAGGGGC | | 79 |
| the Sanger sequencing of the | | | |
| rVSVΔG-SARS-CoV-2 genome) | | | |
| 13gVSV_2000f (primer used for | TCCATGACTTTCCAACCCAAGA | | 80 |
| the Sanger sequencing of the | | | |
| rVSVΔG-SARS-CoV-2 genome) | | | |
| 14gVSV_2400f (primer used for | CGAGATGGACACCTATGATCCGAA | | 81 |
| the Sanger sequencing of the | | | |
| rVSVΔG-SARS-CoV-2 genome) | | | |
| 15gVSV_1200r (primer used for | GCTCTTTTCGCATACTGCATCATA | | 82 |
| the Sanger sequencing of the | | | |
| rVSVΔG-SARS-CoV-2 genome) | | | |
| 16gVSV_1600r (primer used for | CCACTTCCTCATCTGCATAGTCAT | | 83 |
| the Sanger sequencing of the | | | |
| rVSVΔG-SARS-CoV-2 genome) | | | |
| 17gVSV_2000r (primer used for | CTCCGACAGAGATGAACTCTCCTC | | 84 |
| the Sanger sequencing of the | | | |
| rVSVΔG-SARS-CoV-2 genome) | | | |
| 18gVSV_2400r (primer used for | GCTGCCACATCTGAGTATGTTCTG | | 85 |
| the Sanger sequencing of the | | | |
| rVSVΔG-SARS-CoV-2 genome) | | | |
| 19gVSV_2000f (primer used for | TCCATGACTTTCCAACCCAAGA | | 86 |
| the Sanger sequencing of the | | | |
| rVSVΔG-SARS-CoV-2 genome) | | | |
| 20gVSV_2400f (primer used for | CGAGATGGACACCTATGATCCGAA | | 87 |
| the Sanger sequencing of the | | | |
| rVSVΔG-SARS-CoV-2 genome) | | | |
| 21gVSV_2800f2 (primer used | CTACGATGATGAGTCACTGG | | 88 |
| for the Sanger sequencing of | | | |
| the rVSVΔG-SARS-CoV-2 | | | |
| genome) | | | |
| 22gVSV_2400r (primer used for | GCTGCCACATCTGAGTATGTTCTG | | 89 |
| the Sanger sequencing of the | | | |
| rVSVΔG-SARS-CoV-2 genome) | | | |
| 23gVSV_2800r (primer used for | CCTTTTTCTCGACAATCAGGCC | | 90 |
| the Sanger sequencing of the | | | |
| rVSVΔG-SARS-CoV-2 genome) | | | |
| 24CoV_S_rvs1 (primer used for | CTCTTTGTTCCATTGGTTCC | | 91 |
| the Sanger sequencing of the | | | |
| rVSVΔG-SARS-CoV-2 genome) | | | |
| 25gVSV_2400f (primer used for | CGAGATGGACACCTATGATCCGAA | | 92 |
| the Sanger sequencing of the | | | |
| rVSVΔG-SARS-CoV-2 genome) | | | |
| 26CoV_S_fw1 (primer used for | AGTGGATCCTACTCGAGAGG | | 93 |
| the Sanger sequencing of the | | | |
| rVSVΔG-SARS-CoV-2 genome) | | | |
| 27CoV_S_fw2 (primer used for | CATTAAAGTCTGTGAATTCC | | 94 |
| the Sanger sequencing of the | | | |
| rVSVΔG-SARS-CoV-2 genome) | | | |
| 28CoV_S_fw3 (primer used for | AGCAGCTGCTTACTATGTTG | | 95 |
| the Sanger sequencing of the | | | |
| rVSVΔG-SARS-CoV-2 genome) | | | |
| 29CoV_S_fw4 (primer used for | GTATATGCAGATTCCTTTGT | | 96 |
| the Sanger sequencing of the | | | |
| rVSVΔG-SARS-CoV-2 genome) | | | |
| 30CoV_S_fw5 (primer used for | ACCTAAGAAGAGCACTAATCT | | 97 |
| the Sanger sequencing of the | | | |
| rVSVΔG-SARS-CoV-2 genome) | | | |
| 31CoV_S_rvs1 (primer used for | CTCTTTGTTCCATTGGTTCC | | 98 |
| the Sanger sequencing of the | | | |
| rVSVΔG-SARS-CoV-2 genome) | | | |
| 32CoV_S_rvs2 (primer used for | GATCTCTAACTAGGTTTATAGGTGT | | 99 |
| the Sanger sequencing of the | | | |
| rVSVΔG-SARS-CoV-2 genome) | | | |
| 33CoV_S_rvs3 (primer used for | AGTAGCATTGAAAACCTCTC | | 100 |
| the Sanger sequencing of the | | | |
| rVSVΔG-SARS-CoV-2 genome) | | | |
| 34CoV_S_rvs4 (primer used for | CATTACACGGTGTGCTGCCC | | 101 |
| the Sanger sequencing of the | | | |
| rVSVΔG-SARS-CoV-2 genome) | | | |
| 35CoV_S_rvs5 (primer used for | GATAGAGAACGGCAACTTGA | | 102 |
| the Sanger sequencing of the | | | |
| rVSVΔG-SARS-CoV-2 genome) | | | |
| 36CoV_S_rvs6 (primer used for | GGAATCTCCACAGATGTACA | | 103 |
| the Sanger sequencing of the | | | |
| rVSVΔG-SARS-CoV-2 genome) | | | |
| 37CoV_S_fw5 (primer used for | ACCTAAGAAGAGCACTAATCT | | 104 |
| the Sanger sequencing of the | | | |
| rVSVΔG-SARS-CoV-2 genome) | | | |
| 38CoV_S_fw6 (primer used for | TGACATTCCAATCGGTGCCG | | 105 |
| the Sanger sequencing of the | | | |
| rVSVΔG-SARS-CoV-2 genome) | | | |
| 39CoV_S_fw7 (primer used for | CCATCAAGGATTTTGGAGGATTTAA | | 106 |
| the Sanger sequencing of the | | | |
| rVSVΔG-SARS-CoV-2 genome) | | | |
| 40CoV_S_fw8 (primer used for | GCTATAGGAAAGATTCAGGA | | 107 |
| the Sanger sequencing of the | | | |
| rVSVΔG-SARS-CoV-2 genome) | | | |
| 41CoV_S_fw9 (primer used for | ACATGTAACATATGTGCCCG | | 108 |
| the Sanger sequencing of the | | | |
| rVSVΔG-SARS-CoV-2 genome) | | | |
| 42CoV_S_fw10 (primer used for | TGATCGACCTTCAGGAGCTG | | 109 |
| the Sanger sequencing of the | | | |
| rVSVΔG-SARS-CoV-2 genome) | | | |
| 43CoV_S_rvs7 (primer used for | TGTAATTGTACCAGCCAACA | | 110 |
| the Sanger sequencing of the | | | |
| rVSVΔG-SARS-CoV-2 genome) | | | |
| 44CoV_S_rvs8 (primer used for | TGATGAGTTGTTGGGTGACG | | 111 |
| the Sanger sequencing of the | | | |
| rVSVΔG-SARS-CoV-2 genome) | | | |
| 45CoV_S_rvs9 (primer used for | GGAATCGAGTTCAGGTTGTA | | 112 |
| the Sanger sequencing of the | | | |
| rVSVΔG-SARS-CoV-2 genome) | | | |
| 46CoV_S_rvs10 (primer used | AACGCGTAAACAGCTAGCCT | | 113 |
| for the Sanger sequencing of | | | |
| the rVSVΔG-SARS-CoV-2 | | | |
| genome) | | | |
| 47gVSVGene4_f (primer used | TTAATGTTTGGCCTGATTGTCGAGA | | 114 |
| for the Sanger sequencing of | | | |
| the rVSVΔG-SARS-CoV-2 | | | |
| genome) | | | |
| 48gVSVGene4_rev (primer | GCGCTCATCGGGATTCAGGAA | | 115 |
| used for the Sanger | | | |
| sequencing of the rVSVΔG- | | | |
| SARS-CoV-2 genome) | | | |
| 49gVSV_4800r (primer used for | CCACCACGTCAAATGTTATTTC | | 116 |
| the Sanger sequencing of the | | | |
| rVSVΔG-SARS-CoV-2 genome) | | | |
| 50CoV_S_fw10 (primer used for | ACATGTAACATATGTGCCCG | | 117 |
| the Sanger sequencing of the | | | |
| rVSVΔG-SARS-CoV-2 genome) | | | |
| 51gVSV_5300f (primer used for | GGGCAACAAACCAATTGAAT | | 118 |
| the Sanger sequencing of the | | | |
| rVSVΔG-SARS-CoV-2 genome) | | | |
| 52gVSV_5800f (primer used for | GCAAGAGAATCAAGGCCTTTAGT | | 119 |
| the Sanger sequencing of the | | | |
| rVSVΔG-SARS-CoV-2 genome) | | | |
| 53gVSV_6300f (primer used for | CCCATCGATAATATACTCTGACAAA | | 120 |
| the Sanger sequencing of the | | | |
| rVSVΔG-SARS-CoV-2 genome) | | | |
| 54gVSV_6800f (primer used for | TCCTTAATCGAGAGAACTCATGAA | | 121 |
| the Sanger sequencing of the | | | |
| rVSVΔG-SARS-CoV-2 genome) | | | |
| 55gVSV_4800r (primer used for | CCACCACGTCAAATGTTATTTC | | 122 |
| the Sanger sequencing of the | | | |
| rVSVΔG-SARS-CoV-2 genome) | | | |
| 56gVSV_5200r2 (primer used | ACTAAAGGCCTTGATTCTCTTGC | | 123 |
| for the Sanger sequencing of | | | |
| the rVSVΔG-SARS-CoV-2 | | | |
| genome) | | | |
| 57gVSV_5200r (primer used for | GATGGGTCTAGTAAGTCGGGTATT | | 124 |
| the Sanger sequencing of the | | | |
| rVSVΔG-SARS-CoV-2 genome) | | | |
| 58gVSV_6200r2 (primer used | TTCATGAGTTCTCTCGATTAAGGA | | 125 |
| for the Sanger sequencing of | | | |
| the rVSVΔG-SARS-CoV-2 | | | |
| genome) | | | |
| 59gVSV_6200r (primer used for | CACTCGTGACCATCTCTTGG | | 126 |
| the Sanger sequencing of the | | | |
| rVSVΔG-SARS-CoV-2 genome) | | | |
| 60gVSV_6300f (primer used for | CCCATCGATAATATACTCTGACAAA | | 127 |
| the Sanger sequencing of the | | | |
| rVSVΔG-SARS-CoV-2 genome) | | | |
| 61gVSV_6800f (primer used for | TCCTTAATCGAGAGAACTCATGAA | | 128 |
| the Sanger sequencing of the | | | |
| rVSVΔG-SARS-CoV-2 genome) | | | |
| 62gVSV_7300f (primer used for | TGACCAAATACCCACTTGTGC | | 129 |
| the Sanger sequencing of the | | | |
| rVSVΔG-SARS-CoV-2 genome) | | | |
| 63gVSV_7800f (primer used for | CGAACTTGTTAAAGACTGAGGTTAA | | 130 |
| the Sanger sequencing of the | | | |
| rVSVΔG-SARS-CoV-2 genome) | | | |
| 64JKgVSV_8300f (primer used | CGGGATCCATGACGTCTTTA | | 131 |
| for the Sanger sequencing of | | | |
| the rVSVΔG-SARS-CoV-2 | | | |
| genome) | | | |
| 65gVSV_8800f (primer used for | TTTGAGACCCATAGAAGAGATCAC | | 132 |
| the Sanger sequencing of the | | | |
| rVSVΔG-SARS-CoV-2 genome) | | | |
| 66gVSV_6200r (primer used for | CACTCGTGACCATCTCTTGG | | 133 |
| the Sanger sequencing of the | | | |
| rVSVΔG-SARS-CoV-2 genome) | | | |
| 67gVSV_7200r2 (primer used | TTAACCTCAGTCTTTAACAAGTTCG | | 134 |
| for the Sanger sequencing of | | | |
| the rVSVΔG-SARS-CoV-2 | | | |
| genome) | | | |
| 68gVSV_7200r (primer used for | TGAACCCTGATGTGTTACATGG | | 135 |
| the Sanger sequencing of the | | | |
| rVSVΔG-SARS-CoV-2 genome) | | | |
| 69gVSV_8200r2 (primer used | GTGATCTCTTCTATGGGTCTCAAA | | 136 |
| for the Sanger sequencing of | | | |
| the rVSVΔG-SARS-CoV-2 | | | |
| genome) | | | |
| 70gVSV_8200r (primer used for | TCGTTTCTAATTCGTCTCTAATAGG | | 137 |
| the Sanger sequencing of the | | | |
| rVSVΔG-SARS-CoV-2 genome) | | | |
| 71gVSV_8300f (primer used for | CGGGATCCATGACGTCTTTA | | 138 |
| the Sanger sequencing of the | | | |
| rVSVΔG-SARS-CoV-2 genome) | | | |
| 72gVSV_8800f (primer used for | TTTGAGACCCATAGAAGAGATCAC | | 139 |
| the Sanger sequencing of the | | | |
| rVSVΔG-SARS-CoV-2 genome) | | | |
| 73gVSV_9300f (primer used for | CTCCTATCCGACAAGCAACC | | 140 |
| the Sanger sequencing of the | | | |
| rVSVΔG-SARS-CoV-2 genome) | | | |
| 74gVSV_9800f (primer used for | GAATCAGGTTGGGCCAATTA | | 141 |
| the Sanger sequencing of the | | | |
| rVSVΔG-SARS-CoV-2 genome) | | | |
| 75gVSV_10300f (primer used | GAGCGAAAAGAATGCAGTAACA | | 142 |
| for the Sanger sequencing of | | | |
| the rVSVΔG-SARS-CoV-2 | | | |
| genome) | | | |
| 76gVSV_10800f (primer used | GCTTTTGGCTGAGTTTGATG | | 143 |
| for the Sanger sequencing of | | | |
| the rVSVΔG-SARS-CoV-2 | | | |
| genome) | | | |
| 77JKVSVGene6_f (primer used | AAACACAGGAATGATTGAAT | | 144 |
| for the Sanger sequencing of | | | |
| the rVSVΔG-SARS-CoV-2 | | | |
| genome) | | | |
| 78gVSV_8200r (primer used for | TCGTTTCTAATTCGTCTCTAATAGG | | 145 |
| the Sanger sequencing of the | | | |
| rVSVΔG-SARS-CoV-2 genome) | | | |
| 79gVSV_9200r2 (primer used | TAATTGGCCCAACCTGATTC | | 146 |
| for the Sanger sequencing of | | | |
| the rVSVΔG-SARS-CoV-2 | | | |
| genome) | | | |
| 80gVSV_9200r (primer | CGCTCTCACAAATATATGTTCCATA | | 147 |
| used for the Sanger | | | |
| sequencing of the rVSVΔG- | | | |
| SARS-CoV-2 genome) | | | |
| 81gVSV_10200r2 (primer | CATCAAACTCAGCCAAAAGC | | 148 |
| used for the Sanger | | | |
| sequencing of the rVSVΔG- | | | |
| SARS-CoV-2 genome) | | | |
| 82JRVSVTrai1er_r (primer | ACGAAGACCACAAAACCAGATAAA | | 149 |
| used for the Sanger | | | |
| sequencing of the rVSVΔG- | | | |
| SARS-CoV-2 genome) | | | |
| Nucleotide sequence for | 1 | acgaagacaa acaaaccatt attatcatta aaaggctcag gagaaacttt aacagtaatc | 150 |
| rVSVΔG-SARS-CoV-2 clone | 61 | aaaatgtctg ttacagtcaa gagaatcatt gacaacacag tcgtagttcc aaaacttcct | |
| MB1 | 121 | gcaaatgagg atccagtgga atacccggca gattacttca gaaaatcaaa ggagattcct | |
| | 181 | ctttacatca atactacaaa aagtttgtca gatctaagag gatatgtcta ccaaggcctc | |
| | 241 | aaatccggaa atgtatcaat catacatgtc aacagctact tgtatggagc attaaaggac | |
| | 301 | atccggggta agttggataa agattggtca agtttcggaa taaacatcgg gaaagcaggg | |
| | 361 | gatacaatcg gaatatttga ccttgtatcc ttgaaagccc tggacggcgt acttccagat | |
| | 421 | ggagtatcgg atgcttccag aaccagcgca gatgacaaat ggttgccttt gtatctactt | |
| | 481 | ggcttataca gagtgggcag aacacaaatg cctgaataca gaaaaaagct catggatggg | |
| | 541 | ctgacaaatc aatgcaaaat gatcaatgaa cagtttgaac ctcttgtgcc agaaggtcgt | |
| | 601 | gacatttttg atgtgtgggg aaatgacagt aattacacaa aaattgtcgc tgcagtggac | |
| | 661 | atgttcttcc acatgttcaa aaaacatgaa tgtgcctcgt tcagatacgg aactattgtt | |
| | 721 | tccagattca aagattgtgc tgcattggca acatttggac acctctgcaa aataaccgga | |
| | 781 | atgtctacag aagatgtaac gacctggatc ttgaaccgag aagttgcaga tgaaatggtc | |
| | 841 | caaatgatgc ttccaggcca agaaattgac aaggccgatt catacatgcc ttatttgatc | |
| | 901 | gactttggat tgtcttctaa gtctccatat tcttccgtca aaaaccctgc cttccacttc | |
| | 961 | tgggggcaat tgacagctct tctgctcaga tccaccagag caaggaatgc ccgacagcct | |
| | 1021 | gatgacattg agtatacatc tcttactaca gcaggtttgt tgtacgctta tgcagtagga | |
| | 1081 | tcctctgccg acttggcaca acagttttgt gttggagata acaaatacac tccagatgat | |
| | 1141 | agtaccggag gattgacgac taatgcaccg ccacaaggca gagatgtggt cgaatggctc | |
| | 1201 | ggatggtttg aagatcaaaa cagaaaaccg actcctgata tgatgcagta tgcgaaaaga | |
| | 1261 | gcagtcatgt cactgcaagg cctaagagag aagacaattg gcaagtatgc taagtcagaa | |
| | 1321 | tttgacaaat gaccctataa ttctcagatc acctattata tattatgcta catatgaaaa | |
| | 1381 | aaactaacag atatcatgga taatctcaca aaagttcgtg agtatctcaa gtcctattct | |
| | 1441 | cgtctggatc aggcggtagg agagatagat gagatcgaag cacaacgagc tgaaaagtcc | |
| | 1501 | aattatgagt tgttccaaga ggatggagtg gaagagcata ctaagccctc ttattttcag | |
| | 1561 | gcagcagatg attctgacac agaatctgaa ccagaaattg aagacaatca aggcttgtat | |
| | 1621 | gcaccagatc cagaagctga gcaagttgaa ggctttatac aggggccttt agatgactat | |
| | 1681 | gcagatgagg aagtggatgt tgtatttact tcggactgga aacagcctga gcttgaatct | |
| | 1741 | gacgagcatg gaaagacctt acggttgaca tcgccagagg gtttaagtgg agagcagaaa | |
| | 1801 | tcccagtggc tttcgacgat taaagcagtc gtgcaaagtg ccaaatactg gaatctggca | |
| | 1861 | gagtgcacat ttgaagcatc gggagaaggg gtcattatga aggagcgcca gataactccg | |
| | 1921 | gatgtatata aggtcactcc agtgatgaac acacatccgt cccaatcaga agcagtatca | |
| | 1981 | gatgtttggt ctctctcaaa gacatccatg actttccaac ccaagaaagc aagtcttcag | |
| | 2041 | cctctcacca tatccttgga tgaattgttc tcatctagag gagagttcat ctctgtcgga | |
| | 2101 | ggtgacggac gaatgtctca taaagaggcc atcctgctcg gcctgagata caaaaagttg | |
| | 2161 | tacaatcagg cgagagtcaa atattctctg tagactatga aaaaaagtaa cagatatcac | |
| | 2221 | gatctaagtg ttatcccaat ccattcatca tgagttcctt aaagaagatt ctcggtctga | |
| | 2281 | aggggaaagg taagaaatct aagaaattag ggatcgcacc acccccttat gaagaggaca | |
| | 2341 | ctagcatgga gtatgctccg agcgctccaa ttgacaaatc ctattttgga gttgacgaga | |
| | 2401 | tggacaccta tgatccgaat caattaagat ctgagaaatt cttctttaca gtgaaaatga | |
| | 2461 | cggttagatc taatcgtccg ttcagaacat actcagatgt ggcagccgct gtatcccatt | |
| | 2521 | gggatcacat gtacatcgga atggcaggga aacgtccctt ctacaaaatc ttggcttttt | |
| | 2581 | tgggttcttc taatctaaag gccactccag cggtattggc agatcaaggt caaccagagt | |
| | 2641 | atcacgctca ctgcgaaggc agggcttatt tgccacatag gatggggaag acccctccca | |
| | 2701 | tgctcaatgt accagagcac ttcagaagac cattcaatat aggtctttac aagggaacga | |
| | 2761 | ttgagctcac aatgaccatc tacgatgatg agtcactgga agcagctcct atgatctggg | |
| | 2821 | atcatttcaa ttcttccaaa ttttctgatt tcagagagaa ggccttaatg tttggcctga | |
| | 2881 | ttgtcgagaa aaaggcatct ggagcgtggg tcctggactc tatcggccac ttcaaatgag | |
| | 2941 | ctagtctaac ttctagcttc tgaacaatcc ccggtttact cagtctcccc taattccagc | |
| | 3001 | ctctcgaaca actaatatcc tgtcttttct atccctatga aaaaaactaa cagagattga | |
| | 3061 | tctgtttacg cgctagtgga tcctactcga gaggagccac catgttcgtg ttcctggtgc | |
| | 3121 | tattacctct ggtttcgtct caatgcgtaa accttacaac tagaactcag cttcctccag | |
| | 3181 | catacacaaa ttccttcact cgcggagtgt attatcctga taaggtcttt cgatcatcag | |
| | 3241 | tgttgcattc cacccaggat ttgtttctcc cgttcttttc aaatgtaact tggttccatg | |
| | 3301 | ctatacatgt ttccggaacc aatggaacaa agagatttga taacccagtg ttaccattta | |
| | 3361 | acgacggagt ttatttcgca tcaactgaga aatccaatat cattagaggc tggattttcg | |
| | 3421 | gaacgaccct ggattctaaa acgcaatcct tgctgattgt taataatgca acaaatgtgg | |
| | 3481 | tcattaaagt ctgtgaattc caattttgca atgatccatt tctcggcgtc tattaccaca | |
| | 3541 | agaataacaa atcttggatg gagtcagagt tcagggttta tagttccgca aataattgta | |
| | 3601 | cttttgaata cgtttcccaa ccattcttaa tggacttgga gggaaaacag ggaaatttta | |
| | 3661 | agaatctaag agaattcgtc tttaagaata ttgatggata tttcaagatc tattcaaaac | |
| | 3721 | atacacctat aaacctagtt agagatctcc cgcaagggtt ttcagcccta gagccactag | |
| | 3781 | ttgacctgcc aattgggatc aacattacta gattccagac cctactcgct ctgcatcggt | |
| | 3841 | catatttgac accaggagat tcatcgtcag gatggaccgc tggagcagct gcttactatg | |
| | 3901 | ttgggtatct gcaacctaga acatttctcc taaagtataa tgaaaacggg actattacag | |
| | 3961 | acgcagtcga ttgcgcactg gatccactct cagagacaaa gtgcactcta aaatcattca | |
| | 4021 | ctgtcgagaa aggaatctat caaacatcaa atttcagggt ccagccaact gagagtattg | |
| | 4081 | tccggttccc taacataact aacttgtgcc ccttcggaga ggttttcaat gctactcggt | |
| | 4141 | tcgccagcgt ctacgcatgg aacagaaaga ggatttcaaa ctgtgtcgca gattatagcg | |
| | 4201 | tcctctataa ttcagcatca ttcagtacat ttaaatgcta tggtgtcagc cccaccaaac | |
| | 4261 | ttaatgactt atgttttacc aatgtatatg cagattcctt tgtaatcaga ggtgacgaag | |
| | 4321 | tgaggcaaat cgcacctgga cagaccggaa agattgctga ttataattat aaactccctg | |
| | 4381 | atgattttac cggatgtgtt attgcttgga acagcaataa cctcgatagt aaggtcggag | |
| | 4441 | gaaactataa ctatttgtac agactgttta gaaagtcgaa tttgaaacct tttgaaagag | |
| | 4501 | acatatccac cgagatttac caggcgggca gcacaccgtg taatggtgta gaaggattca | |
| | 4561 | attgttactt tcccctgcaa tcatatgggt ttcaaccaac caatggagtc ggatatcaac | |
| | 4621 | catatcgtgt cgtcgtcctt tccttcgagc tgcttcatgc accagctaca gtctgcggac | |
| | 4681 | ctaagaagag cactaatctt gtcaagaaca aatgtgtgaa ctttaatttt aatggattaa | |
| | 4741 | caggaaccgg agttttgacc gagagtaata agaagttctt gccgttccag caatttggac | |
| | 4801 | gagacattgc tgacaccaca gatgcggttc gtgacccgca aactttagag atcctagaca | |
| | 4861 | tcaccccatg ttcattcggt ggagtttccg ttattactcc tggaacgaat acaagcaatc | |
| | 4921 | aagttgccgt tctctatcaa gatgttaatt gtacagaagt gcctgtggcc attcatgcag | |
| | 4981 | atcaactaac accaacttgg agagtttaca gcactgggtc caatgtcttc caaacgcgcg | |
| | 5041 | ccggctgcct cattggtgca gaacatgtga ataactcata cgaatgtgac attccaatcg | |
| | 5101 | gtgccggcat atgcgcctct taccagactc agactaattc gccaagagga gccaggtctg | |
| | 5161 | tcgcaagtca gtcaattatt gcatacacaa tgtcgttagg agcagagaat agtgtagcat | |
| | 5221 | actcaaacaa ttctatagca atacctacca acttcactat atcagtaact acagaaatat | |
| | 5281 | tgccagtatc catgactaaa acaagtgtgg attgcaccat gtacatctgt ggagattcca | |
| | 5341 | cagaatgcag caatcttctc ttgcaatacg gatcattctg cacacaactg aatagggcac | |
| | 5401 | tgactggaat tgcagtcgag caggataaga acacacagga ggtgtttgcc caagtcaaac | |
| | 5461 | aaatatacaa aacaccaccc atcaaggatt ttggaggatt taatttctca caaatactcc | |
| | 5521 | ccgacccatc caagcccttc aaaaggagtt tcattgagga cctcttgttt aataaggtta | |
| | 5581 | ccttggcaga tgccgggttt attaagcagt acggcgactg tcttggagac atagcagcca | |
| | 5641 | gagatctaat ttgtgcccag aaattcaatg gactgacagt cctgcctccc ttattaactg | |
| | 5701 | atgagatgat agctcagtat acatcagcat tgttggctgg tacaattaca tctggatgga | |
| | 5761 | catttggtgc cggagcggca ttacaaatcc cttttgcaat gcaaatggcc tatagattta | |
| | 5821 | atggaatcgg agtaactcaa aatgttttat atgagaatca gaaattaatt gcaaatcaat | |
| | 5881 | tcaattcagc tataggaaag attcaggatt cactcagtag tacagcaagc gctctaggca | |
| | 5941 | aattacaaga cgtcgtcaat cagaatgcac aggcattaaa tacactggtg aagcaattga | |
| | 6001 | gttccaattt cggagcaatt tcatctgttc taaatgatat attgtcaaga ctggataaag | |
| | 6061 | tagaagccga ggtccaaatc gataggctga tcacaggaag acttcaatca ctacagacat | |
| | 6121 | acgtcaccca acaactcatc agagcagcag aaattagagc ctctgctaat ctagccgcaa | |
| | 6181 | caaagatgtc agagtgcgta ttgggacaat ctaagagggt cgacttttgt ggaaaggggt | |
| | 6241 | atcacttgat gtcctttcct caatctgcac cacacggagt tgtcttctta catgtaacat | |
| | 6301 | atgtgcccgc tcaagaaaag aatttcacta cagcacctgc aatatgtcat gacggaaaag | |
| | 6361 | cacattttcc tcgggaggga gttttcgttt ctaatggaac ccattggttc gtgacccaaa | |
| | 6421 | ggaactttta cgagcctcaa ataattacaa ctgataatac attcgtttct ggaaattgcg | |
| | 6481 | acgtagttat aggtattgta aataatactg tttatgaccc tttacaacct gaactcgatt | |
| | 6541 | ccttcaagga agaactcgac aaatatttta agaatcacac ctcaccggac gttgacttag | |
| | 6601 | gagacatttc cgggattaac gctagtgtag tcaatatcca aaaggagata gatagactga | |
| | 6661 | atgaggtagc aaagaatctt aatgaatctt tgatcgacct tcaggagctg gggaagtacg | |
| | 6721 | aacaatacat aaaatggcca tggtacattt ggctcgggtt tattgctgga ctaattgcaa | |
| | 6781 | tagtcatggt cactatcatg ctgtgttgta tgacatcgtg ctgctcatgc ctcaagggat | |
| | 6841 | gttgtagctg ttgatcttgt tgcaagttcg atgaggatga ttcagaacca gttttaaaag | |
| | 6901 | gagtaaagtt gcattacaca taaaggctag ctgtttacgc gttatccatg ctcaaagagg | |
| | 6961 | cctcaattat atttgagttt ttaattttta tgaaaaaaac taacagcaat catggaagtc | |
| | 7021 | cacgattttg agaccgacga gttcaatgat ttcaatgaag atgactatgc cacaagagaa | |
| | 7081 | ttcctgaatc ccgatgagcg catgacgtac ttgaatcatg ctgattacaa cctgaattct | |
| | 7141 | cctctaatta gtgatgatat tgacaattta atcaggaaat tcaattctct tccaattccc | |
| | 7201 | tcgatgtggg atagtaagaa ctgggatgga gttcttgaga tgttaacgtc atgtcaagcc | |
| | 7261 | aatcccatcc caacatctca gatgcataaa tggatgggaa gttggttaat gtctgataat | |
| | 7321 | catgatgcca gtcaagggta tagtttttta catgaagtgg acaaagaggc agaaataaca | |
| | 7381 | tttgacgtgg tggagacctt catccgcggc tggggcaaca aaccaattga atacatcaaa | |
| | 7441 | aaggaaagat ggactgactc attcaaaatt ctcgcttatt tgtgtcaaaa gtttttggac | |
| | 7501 | ttacacaagt tgacattaat cttaaatgct gtctctgagg tggaattgct caacttggcg | |
| | 7561 | aggactttca aaggcaaagt cagaagaagt tctcatggaa cgaacatatg caggattagg | |
| | 7621 | gttcccagct tgggtcctac ttttatttca gaaggatggg cttacttcaa gaaacttgat | |
| | 7681 | attctaatgg accgaaactt tctgttaatg gtcaaagatg tgattatagg gaggatgcaa | |
| | 7741 | acggtgctat ccatggtatg tagaatagac aacctgttct cagagcaaga catcttctcc | |
| | 7801 | cttctaaata tctacagaat tggagataaa attgtggaga ggcagggaaa tttttcttat | |
| | 7861 | gacttgatta aaatggtgga accgatatgc aacttgaagc tgatgaaatt agcaagagaa | |
| | 7921 | tcaaggcctt tagtcccaca attccctcat tttgaaaatc atatcaagac ttctgttgat | |
| | 7981 | gaaggggcaa aaattgaccg aggtataaga ttcctccatg atcagataat gagtgtgaaa | |
| | 8041 | acagtggatc tcacactggt gatttatgga tcgttcagac attggggtca tccttttata | |
| | 8101 | gattattaca ctggactaga aaaattacat tcccaagtaa ccatgaagaa agatattgat | |
| | 8161 | gtgtcatatg caaaagcact tgcaagtgat ttagctcgga ttgttctatt tcaacagttc | |
| | 8221 | aatgatcata aaaagtggtt cgtgaatgga gacttgctcc ctcatgatca tccctttaaa | |
| | 8281 | agtcatgtta aagaaaatac atggcccaca gctgctcaag ttcaagattt tggagataaa | |
| | 8341 | tggcatgaac ttccgctgat taaatgtttt gaaatacccg acttactaga cccatcgata | |
| | 8401 | atatactctg acaaaagtca ttcaatgaat aggtcagagg tgttgaaaca tgtccgaatg | |
| | 8461 | aatccgaaca ctcctatccc tagtaaaaag gtgttgcaga ctatgttgga cacaaaggct | |
| | 8521 | accaattgga aagaatttct taaagagatt gatgagaagg gcttagatga tgatgatcta | |
| | 8581 | attattggtc ttaaaggaaa ggagagggaa ctgaagttgg caggtagatt tttctcccta | |
| | 8641 | atgtcttgga aattgcgaga atactttgta attaccgaat atttgataaa gactcatttc | |
| | 8701 | gtccctatgt ttaaaggcct gacaatggcg gacgatctaa ctgcagtcat taaaaagatg | |
| | 8761 | ttagattcct catccggcca aggattgaag tcatatgagg caatttgcat agccaatcac | |
| | 8821 | attgattacg aaaaatggaa taaccaccaa aggaagttat caaacggccc agtgttccga | |
| | 8881 | gttatgggcc agttcttagg ttatccatcc ttaatcgaga gaactcatga attttttgag | |
| | 8941 | aaaagtctta tatactacaa tggaagacca gacttgatgc gtgttcacaa caacacactg | |
| | 9001 | atcaattcaa cctcccaacg agtttgttgg caaggacaag agggtggact ggaaggtcta | |
| | 9061 | cggcaaaaag gatggagtat cctcaatcta ctggttattc aaagagaggc taaaatcaga | |
| | 9121 | aacactgctg tcaaagtctt ggcacaaggt gataatcaag ttatttgcac acagtataaa | |
| | 9181 | acgaagaaat cgagaaacgt tgtagaatta cagggtgctc tcaatcaaat ggtttctaat | |
| | 9241 | aatgagaaaa ttatgactgc aatcaaaata gggacaggga agttaggact tttgataaat | |
| | 9301 | gacgatgaga ctatgcaatc tgcagattac ttgaattatg gaaaaatacc gattttccgt | |
| | 9361 | ggagtgatta gagggttaga gaccaagaga tggtcacgag tgacttgtgt caccaatgac | |
| | 9421 | caaataccca cttgtgctaa tataatgagc tcagtttcca caaatgctct caccgtagct | |
| | 9481 | cattttgctg agaacccaat caatgccatg atacagtaca attattttgg gacatttgct | |
| | 9541 | agactcttgt tgatgatgca tgatcctgct cttcgtcaat cattgtatga agttcaagat | |
| | 9601 | aagataccag gcttgcacag ttctactttc aaatacgcca tgttgtattt ggacccttcc | |
| | 9661 | attggaggag tgtcgggcat gtctttgtcc aggtttttga ttagagcctt cccagatccc | |
| | 9721 | gtaacagaaa gtctctcatt ctggagattc atccatgtac atgctcgaag tgagcatctg | |
| | 9781 | aaggagatga gtgcagtatt tggaaacccc gagatagcca agtttcgaat aactcacata | |
| | 9841 | gacaagctag tagaagatcc aacctctctg aacatcgcta tgggaatgag tccagcgaac | |
| | 9901 | ttgttaaaga ctgaggttaa aaaatgctta atcgaatcaa gacaaaccat caggaaccag | |
| | 9961 | gtgattaagg atgcaaccat atatttgtat catgaagagg atcggctcag aagtttctta | |
| | 10021 | tggtcaataa atcctctgtt ccctagattt ttaagtgaat tcaaatcagg cacttttttg | |
| | 10081 | ggagtcgcag acgggctcat cagtctattt caaaattctc gtactattcg gaactccttt | |
| | 10141 | aagaaaaagt atcataggga attggatgat ttgattgtga ggagtgaggt atcctctttg | |
| | 10201 | acacatttag ggaaacttca tttgagaagg ggatcatgta aaatgtggac atgttcagct | |
| | 10261 | actcatgctg acacattaag atacaaatcc tggggccgta cagttattgg gacaactgta | |
| | 10321 | ccccatccat tagaaatgtt gggtccacaa catcgaaaag agactccttg tgcaccatgt | |
| | 10381 | aacacatcag ggttcaatta tgtttctgtg cattgtccag acgggatcca tgacgtcttt | |
| | 10441 | agttcacggg gaccattgcc tgcttatcta gggtctaaaa catctgaatc tacatctatt | |
| | 10501 | ttgcagcctt gggaaaggga aagcaaagtc ccactgatta aaagagctac acgtcttaga | |
| | 10561 | gatgctatct cttggtttgt tgaacccgac tctaaactag caatgactat actttctaac | |
| | 10621 | atccactctt taacaggcga agaatggacc aaaaggcagc atgggttcaa aagaacaggg | |
| | 10681 | tctgcccttc ataggttttc gacatctcgg atgagccatg gtgggttcgc atctcagagc | |
| | 10741 | actgcagcat tgaccaggtt gatggcaact acagacacca tgagggatct gggagatcag | |
| | 10801 | aatttcgact ttttattcca agcaacgttg ctctatgctc aaattaccac cactgttgca | |
| | 10861 | agagacggat ggatcaccag ttgtacagat cattatcata ttgcctgtaa gtcctgtttg | |
| | 10921 | agacccatag aagagatcac cctggactca agtatggact acacgccccc agatgtatcc | |
| | 10981 | catgtgctga agacatggag gaatggggaa ggttcgtggg gacaagagat aaaacagatc | |
| | 11041 | tatcctttag aagggaattg gaagaattta gcacctgctg agcaatccta tcaagtcggc | |
| | 11101 | agatgtatag gttttctata tggagacttg gcgtatagaa aatctactca tgccgaggac | |
| | 11161 | agttctctat ttcctctatc tatacaaggt cgtattagag gtcgaggttt cttaaaaggg | |
| | 11221 | ttgctagacg gattaatgag agcaagttgc tgccaagtaa tacaccggag aagtctggct | |
| | 11281 | catttgaaga ggccggccaa cgcagtgtac ggaggtttga tttacttgat tgataaattg | |
| | 11341 | agtgtatcac ctccattcct ttctcttact agatcaggac ctattagaga cgaattagaa | |
| | 11401 | acgattcccc acaagatccc aacctcctat ccgacaagca accgtgatat gggggtgatt | |
| | 11461 | gtcagaaatt acttcaaata ccaatgccgt ctaattgaaa agggaaaata cagatcacat | |
| | 11521 | tattcacaat tatggttatt ctcagatgtc ttatccatag acttcattgg accattctct | |
| | 11581 | atttccacca ccctcttgca aatcctatac aagccatttt tatctgggaa agataagaat | |
| | 11641 | gagttgagag agctggcaaa tctttcttca ttgctaagat caggagaggg gtgggaagac | |
| | 11701 | atacatgtga aattcttcac caaggacata ttattgtgtc cagaggaaat cagacatgct | |
| | 11761 | tgcaagttcg ggattgctaa ggataataat aaagacatga gctatccccc ttggggaagg | |
| | 11821 | gaatccagag ggacaattac aacaatccct gtttattata cgaccacccc ttacccaaag | |
| | 11881 | atgctagaga tgcctccaag aatccaaaat cccctgctgt ccggaatcag gttgggccaa | |
| | 11941 | ttaccaactg gcgctcatta taaaattcgg agtatattac atggaatggg aatccattac | |
| | 12001 | agggacttct tgagttgtgg agacggctcc ggagggatga ctgctgcatt actacgagaa | |
| | 12061 | aatgtgcata gcagaggaat attcaatagt ctgttagaat tatcagggtc agtcatgcga | |
| | 12121 | ggcgcctctc ctgagccccc cagtgcccta gaaactttag gaggagataa atcgagatgt | |
| | 12181 | gtaaatggtg aaacatgttg ggaatatcca tctgacttat gtgacccaag gacttgggac | |
| | 12241 | tatttcctcc gactcaaagc aggcttgggg cttcaaattg atttaattgt aatggatatg | |
| | 12301 | gaagttcggg attcttctac tagcctgaaa attgagacga atgttagaaa ttatgtgcac | |
| | 12361 | cggattttgg atgagcaagg agttttaatc tacaagactt atggaacata tatttgtgag | |
| | 12421 | agcgaaaaga atgcagtaac aatccttggt cccatgttca agacggtcga cttagttcaa | |
| | 12481 | acagaattta gtagttctca aacgtctgaa gtatatatgg tatgtaaagg tttgaagaaa | |
| | 12541 | ttaatcgatg aacccaatcc cgattggtct tccatcaatg aatcctggaa aaacctgtac | |
| | 12601 | gcattccagt catcagaaca ggaatttgcc agagcaaaga aggttagtac atactttacc | |
| | 12661 | ttgacaggta ttccctccca attcattcct gatccttttg taaacattga gactatgcta | |
| | 12721 | caaatattcg gagtacccac gggtgtgtct catgcggctg ccttaaaatc atctgataga | |
| | 12781 | cctgcagatt tattgaccat tagccttttt tatatggcga ttatatcgta ttataacatc | |
| | 12841 | aatcatatca gagtaggacc gatacctccg aaccccccat cagatggaat tgcacaaaat | |
| | 12901 | gtggggatcg ctataactgg tataagcttt tggctgagtt tgatggagaa agacattcca | |
| | 12961 | ctatatcaac agtgtttagc agttatccag caatcattcc cgattaggtg ggaggctgtt | |
| | 13021 | tcagtaaaag gaggatacaa gcagaagtgg agtactagag gtgatgggct cccaaaagat | |
| | 13081 | acccgaattt cagactcctt ggccccaatc gggaactgga tcagatctct ggaattggtc | |
| | 13141 | cgaaaccaag ttcgtctaaa tccattcaat gagatcttgt tcaatcagct atgtcgtaca | |
| | 13201 | gtggataatc atttgaaatg gtcaaatttg cgaagaaaca caggaatgat tgaatggatc | |
| | 13261 | aatagacgaa tttcaaaaga agaccggtct atactgatgt tgaagagtga cctacacgag | |
| | 13321 | gaaaactctt ggagagatta aaaaatcatg aggagactcc aaactttaag tatgaaaaaa | |
| | 13381 | actttgatcc ttaagaccct cttgtggttt ttatttttta tctggttttg tggtcttcgt | |
| Amino acid sequence for VSV- | Please see FIG. 24D. | | 151 |
| M protein in rVSVΔG-SARS- | | | |
| CoV-2 clone MB1 | | | |
| Amino acid sequence for VSV- | Please see FIGS. 21F, 22E, 23E, and 24F. | | 152 |
| L protein in rVSVΔG-SARS- | | | |
| CoV-2 clone MB1, MB2, and | | | |
| Vectors A and B | | | |
| Amino acid sequence for | Please see FIG. 24E. | | 153 |
| SARS-CoV-2 S protein in | | | |
| rVSVΔG-SARS-CoV-2 clone | | | |
| MB1 | | | |
| Nucleotide sequence for | 1 | ACGAAGACAA ACAAACCATT ATTATCATTA AAAGGCTCAG GAGAAACTTT | 154 |
| rVSVΔG-SARS-CoV-2 clone | 51 | AACAGTAATC AAAATGTCTG TTACAGTCAA GAGAATCATT GACAACACAG | |
| MB2 | 101 | TCGTAGTTCC AAAACTTCCT GCAAATGAGG ATCCAGTGGA ATACCCGGCA | |
| | 151 | GATTACTTCA GAAAATCAAA GGAGATTCCT CTTTACATCA ATACTACAAA | |
| | 201 | AAGTTTGTCA GATCTAAGAG GATATGTCTA CCAAGGCCTC AAATCCGGAA | |
| | 251 | ATGTATCAAT CATACATGTC AACAGCTACT TGTATGGAGC ATTAAAGGAC | |
| | 301 | ATCCGGGGTA AGTTGGATAA AGATTGGTCA AGTTTCGGAA TAAACATCGG | |
| | 351 | GAAAGCAGGG GATACAATCG GAATATTTGA CCTTGTATCC TTGAAAGCCC | |
| | 401 | TGGACGGCGT ACTTCCAGAT GGAGTATCGG ATGCTTCCAG AACCAGCGCA | |
| | 451 | GATGACAAAT GGTTGCCTTT GTATCTACTT GGCTTATACA GAGTGGGCAG | |
| | 501 | AACACAAATG CCTGAATACA GAAAAAAGCT CATGGATGGG CTGACAAATC | |
| | 551 | AATGCAAAAT GATCAATGAA CAGTTTGAAC CTCTTGTGCC AGAAGGTCGT | |
| | 601 | GACATTTTTG ATGTGTGGGG AAATGACAGT AATTACACAA AAATTGTCGC | |
| | 651 | TGCAGTGGAC ATGTTCTTCC ACATGTTCAA AAAACATGAA TGTGCCTCGT | |
| | 701 | TCAGATACGG AACTATTGTT TCCAGATTCA AAGATTGTGC TGCATTGGCA | |
| | 751 | ACATTTGGAC ACCTCTGCAA AATAACCGGA ATGTCTACAG AAGATGTAAC | |
| | 801 | GACCTGGATC TTGAACCGAG AAGTTGCAGA TGAAATGGTC CAAATGATGC | |
| | 851 | TTCCAGGCCA AGAAATTGAC AAGGCCGATT CATACATGCC TTATTTGATC | |
| | 901 | GACTTTGGAT TGTCTTCTAA GTCTCCATAT TCTTCCGTCA AAAACCCTGC | |
| | 951 | CTTCCACTTC TGGGGGCAAT TGACAGCTCT TCTGCTCAGA TCCACCAGAG | |
| | 1001 | CAAGGAATGC CCGACAGCCT GATGACATTG AGTATACATC TCTTACTACA | |
| | 1051 | GCAGGTTTGT TGTACGCTTA TGCAGTAGGA TCCTCTGCCG ACTTGGCACA | |
| | 1101 | ACAGTTTTGT GTTGGAGATA ACAAATACAC TCCAGATGAT AGTACCGGAG | |
| | 1151 | GATTGACGAC TAATGCACCG CCACAAGGCA GAGATGTGGT CGAATGGCTC | |
| | 1201 | GGATGGTTTG AAGATCAAAA CAGAAAACCG ACTCCTGATA TGATGCAGTA | |
| | 1251 | TGCGAAAAGA GCAGTCATGT CACTGCAAGG CCTAAGAGAG AAGACAATTG | |
| | 1301 | GCAAGTATGC TAAGTCAGAA TTTGACAAAT GACCCTATAA TTCTCAGATC | |
| | 1351 | ACCTATTATA TATTATGCTA CATATGAAAA AAACTAACAG ATATCATGGA | |
| | 1401 | TAATCTCACA AAAGTTCGTG AGTATCTCAA GTCCTATTCT CGTCTGGATC | |
| | 1451 | AGGCGGTAGG AGAGATAGAT GAGATCGAAG CACAACGAGC TGAAAAGTCC | |
| | 1501 | AATTATGAGT TGTTCCAAGA GGATGGAGTG GAAGAGCATA CTAAGCCCTC | |
| | 1551 | TTATTTTCAG GCAGCAGATG ATTCTGACAC AGAATCTGAA CCAGAAATTG | |
| | 1601 | AAGACAATCA AGGCTTGTAT GCACCAGATC CAGAAGCTGA GCAAGTTGAA | |
| | 1651 | GGCTTTATAC AGGGGCCTTT AGATGACTAT GCAGATGAGG AAGTGGATGT | |
| | 1701 | TGTATTTACT TCGGACTGGA AACAGCCTGA GCTTGAATCT GACGAGCATG | |
| | 1751 | GAAAGACCTT ACGGTTGACA TCGCCAGAGG GTTTAAGTGG AGAGCAGAAA | |
| | 1801 | TCCCAGTGGC TTTCGACGAT TAAAGCAGTC GTGCAAAGTG CCAAATACTG | |
| | 1851 | GAATCTGGCA GAGTGCACAT TTGAAGCATC GGGAGAAGGG GTCATTATGA | |
| | 1901 | AGGAGCGCCA GATAACTCCG GATGTATATA AGGTCACTCC AGTGATGAAC | |
| | 1951 | ACACATCCGT CCCAATCAGA AGCAGTATCA GATGTTTGGT CTCTCTCAAA | |
| | 2001 | GACATCCATG ACTTTCCAAC CCAAGAAAGC AAGTCTTCAG CCTCTCACCA | |
| | 2051 | TATCCTTGGA TGAATTGTTC TCATCTAGAG GAGAGTTCAT CTCTGTCGGA | |
| | 2101 | GGTGACGGAC GAATGTCTCA TAAAGAGGCC ATCCTGCTCG GCCTGAGATA | |
| | 2151 | CAAAAAGTTG TACAATCAGG CGAGAGTCAA ATATTCTCTG TAGACTATGA | |
| | 2201 | AAAAAAGTAA CAGATATCAC GATCTAAGTG TTATCCCAAT CCATTCATCA | |
| | 2251 | TGAGTTCCTT AAAGAAGATT CTCGGTCTGA AGGGGAAAGG TAAGAAATCT | |
| | 2301 | AAGAAATTAG GGATCGCACC ACCCCCTTAT GAAGAGGACA CTAGCATGGA | |
| | 2351 | GTATGCTCCG AGCGCTCCAA TTGACAAATC CTATTTTGGA GTTGACGAGA | |
| | 2401 | TGGACACCTA TGATCCGAAT CAATTAAGAT ATGAGAAATT CTTCTTTACA | |
| | 2451 | GTGAAAATGA CGGTTAGATC TAATCGTCCG TTCAGAACAT ACTCAGATGT | |
| | 2501 | GGCAGCCGCT GTATCCCATT GGGATCACAT GTACATCGGA ATGGCAGGGA | |
| | 2551 | AACGTCCCTT CTACAAAATC TTGGCTTTTT TGGGTTCTTC TAATCTAAAG | |
| | 2601 | GCCACTCCAG CGGTATTGGC AGATCAAGGT CAACCAGAGT ATCACGCTCA | |
| | 2651 | CTGCGAAGGC AGGGCTTATT TGCCACATAG GATGGGGAAG ACCCCTCCCA | |
| | 2701 | TGCTCAATGT ACCAGAGCAC TTCAGAAGAC CATTCAATAT AGGTCTTTAC | |
| | 2751 | AAGGGAACGA TTGAGCTCAC AATGACCATC TACGATGATG AGTCACTGGA | |
| | 2801 | AGCAGCTCCT ATGATCTGGG ATCATTTCAA TTCTTCCAAA TTTTCTGATT | |
| | 2851 | TCAGAGAGAA GGCCTTAATG TTTGGCCTGA TTGTCGAGAA AAAGGCATCT | |
| | 2901 | GGAGCGTGGG TCCTGGACTC TATCGGCCAC TTCAAATGAG CTAGTCTAAC | |
| | 2951 | TTCTAGCTTC TGAACAATCC CCGGTTTACT CAGTCTCCCC TAATTCCAGC | |
| | 3001 | CTCTCGAACA ACTAATATCC TGTCTTTTCT ATCCCTATGA AAAAAACTAA | |
| | 3051 | CAGAGATCGA TCTGTTTACG CGCTAGTGGA TCCTACTCGA GAGGAGCCAC | |
| | 3101 | CATGTTCGTG TTCCTGGTGC TATTACCTCT GGTTTCGTCT CAATGCGTAA | |
| | 3151 | ACCTTACAAC TAGAACTCAG CTTCCTCCAG CATACACAAA TTCCTTCACT | |
| | 3201 | CGCGGAGTGT ATTATCCTGA TAAGGTCTTT CGATCATCAG TGTTGCATTC | |
| | 3251 | CACCCAGGAT TTGTTTCTCC CGTTCTTTTC AAATGTAACT TGGTTCCATG | |
| | 3301 | CTATACATGT TTCCGGAACC AATGGAACAA AGAGATTTGA TAACCCAGTG | |
| | 3351 | TTACCATTTA ACGACGGAGT TTATTTCGCA TCAACTGAGA AATCCAATAT | |
| | 3401 | CATTAGAGGC TGGATTTTCG GAACGACCCT GGATTCTAAA ACGCAATCCT | |
| | 3451 | TGCTGATTGT TAATAATGCA ACAAATGTGG TCATTAAAGT CTGTGAATTC | |
| | 3501 | CAATTTTGCA ATGATCCATT TCTCGGCGTC TATTACCACA AGAATAACAA | |
| | 3551 | ATCTTGGATG GAGTCAGAGT TCAGGGTTTA TAGTTCCGCA AATAATTGTA | |
| | 3601 | CTTTTGAATA CGTTTCCCAA CCATTCTTAA TGGACTTGGA GGGAAAACAG | |
| | 3651 | GGAAATTTTA AGAATCTAAG AGAATTCGTC TTTAAGAATA TTGATGGATA | |
| | 3701 | TTTCAAGATC TATTCAAAAC ATACACCTAT AAACCTAGTT AGAGATCTCC | |
| | 3751 | CGCAAGGGTT TTCAGCCCTA GAGCCACTAG TTGACCTGCC AATTGGGATC | |
| | 3801 | AACATTACTA GATTCCAGAC CCTACTCGCT CTGCATCGGT CATATTTGAC | |
| | 3851 | ACCAGGAGAT TCATCGTCAG GATGGACCGC TGGAGCAGCT GCTTACTATG | |
| | 3901 | TTGGGTATCT GCAACCTAGA ACATTTCTCC TAAAGTATAA TGAAAACGGG | |
| | 3951 | ACTATTACAG ACGCAGTCGA TTGCGCACTG GATCCACTCT CAGAGACAAA | |
| | 4001 | GTGCACTCTA AAATCATTCA CTGTCGAGAA AGGAATCTAT CAAACATCAA | |
| | 4051 | ATTTCAGGGT CCAGCCAACT GAGAGTATTG TCCGGTTCCC TAACATAACT | |
| | 4101 | AACTTGTGCC CCTTCGGAGA GGTTTTCAAT GCTACTCGGT TCGCCAGCGT | |
| | 4151 | CTACGCATGG AACAGAAAGA GGATTTCAAA CTGTGTCGCA GATTATAGCG | |
| | 4201 | TCCTCTATAA TTCAGCATCA TTCAGTACAT TTAAATGCTA TGGTGTCAGC | |
| | 4251 | CCCACCAAAC TTAATGACTT ATGTTTTACC AATGTATATG CAGATTCCTT | |
| | 4301 | TGTAATCAGA GGTGACGAAG TGAGGCAAAT CGCACCTGGA CAGACCGGAA | |
| | 4351 | AGATTGCTGA TTATAATTAT AAACTCCCTG ATGATTTTAC CGGATGTGTT | |
| | 4401 | ATTGCTTGGA ACAGCAATAA CCTCGATAGT AAGGTCGGAG GAAACTATAA | |
| | 4451 | CTATTTGTAC AGACTGTTTA GAAAGTCGAA TTTGAAACCT TTTGAAAGAG | |
| | 4501 | ACATATCCAC CGAGATTTAC CAGGCGGGCA GCACACCGTG TAATGGTGTA | |
| | 4551 | GAAGGATTCA ATTGTTACTT TCCCCTGCAA TCATATGGGT TTCAACCAAC | |
| | 4601 | CAATGGAGTC GGATATCAAC CATATCGTGT CGTCGTCCTT TCCTTCGAGC | |
| | 4651 | TGCTTCATGC ACCAGCTACA GTCTGCGGAC CTAAGAAGAG CACTAATCTT | |
| | 4701 | GTCAAGAACA AATGTGTGAA CTTTAATTTT AATGGATTAA CAGGAACCGG | |
| | 4751 | AGTTTTGACC GAGAGTAATA AGAAGTTCTT GCCGTTCCAG CAATTTGGAC | |
| | 4801 | GAGACATTGC TGACACCACA GATGCGGTTC GTGACCCGCA AACTTTAGAG | |
| | 4851 | ATCCTAGACA TCACCCCATG TTCATTCGGT GGAGTTTCCG TTATTACTCC | |
| | 4901 | TGGAACGAAT ACAAGCAATC AAGTTGCCGT TCTCTATCAA GATGTTAATT | |
| | 4951 | GTACAGAAGT GCCTGTGGCC ATTCATGCAG ATCAACTAAC ACCAACTTGG | |
| | 5001 | AGAGTTTACA GCACTGGGTC CAATGTCTTC CAAACGCGCG CCGGCTGCCT | |
| | 5051 | CATTGGTGCA GAATATGTGA ATAACTCATA CGAATGTGAC ATTCCAATCG | |
| | 5101 | GTGCCGGCAT ATGCGCCTCT TACCAGACTC AGACTAATTC GCCAAGAAGA | |
| | 5151 | GCCAGGTCTG TCGCAAGTCA GTCAATTATT GCATACACAA TGTCGTTAGG | |
| | 5201 | AGCAGAGAAT AGTGTAGCAT ACTCAAACAA TTCTATAGCA ATACCTACCA | |
| | 5251 | ACTTCACTAT ATCAGTAACT ACAGAAATAT TGCCAGTATC CATGACTAAA | |
| | 5301 | ACAAGTGTGG ATTGCACCAT GTACATCTGT GGAGATTCCA CAGAATGCAG | |
| | 5351 | CAATCTTCTC TTGCAATACG GATCATTCTG CACACAACTG AATAGGGCAC | |
| | 5401 | TGACTGGAAT TGCAGTCGAG CAGGATAAGA ACACACAGGA GGTGTTTGCC | |
| | 5451 | CAAGTCAAAC AAATATACAA AACACCACCC ATCAAGGATT TTGGAGGATT | |
| | 5501 | TAATTTCTCA CAAATACTCC CCGACCCATC CAAGCCCTCC AAAAGGAGTT | |
| | 5551 | TCATTGAGGA CCTCTTGTTT AATAAGGTTA CCTTGGCAGA TGCCGGGTTT | |
| | 5601 | ATTAAGCAGT ACGGCGACTG TCTTGGAGAC ATAGCAGCCA GAGATCTAAT | |
| | 5651 | TTGTGCCCAG AAATTCAATG GACTGACAGT CCTGCCTCCC TTATTAACTG | |
| | 5701 | ATGAGATGAT AGCTCAGTAT ACATCAGCAT TGTTGGCTGG TACAATTACA | |
| | 5751 | TCTGGATGGA CATTTGGTGC CGGAGCGGCA TTACAAATCC CTTTTGCAAT | |
| | 5801 | GCAAATGGCC TATAGATTTA ATGGAATCGG AGTAACTCAA AATGTTTTAT | |
| | 5851 | ATGAGAATCA GAAATTAATT GCAAATCAAT TCAATTCAGC TATAGGAAAG | |
| | 5901 | ATTCAGGATT CACTCAGTAG TACAGCAAGC GCTCTAGGCA AATTACAAGA | |
| | 5951 | CGTCGTCAAT CAGAATGCAC AGGCATTAAA TACACTGGTG AAGCAATTGA | |
| | 6001 | GTTCCAATTT CGGAGCAATT TCATCTGTTC TAAATGATAT ATTGTCAAGA | |
| | 6051 | CTGGATAAAG TAGAAGCCGA GGTCCAAATC GATAGGCTGA TCACAGGAAG | |
| | 6101 | ACTTCAATCA CTACAGACAT ACGTCACCCA ACAACTCATC AGAGCAGCAG | |
| | 6151 | AAATTAGAGC CTCTGCTAAT CTAGCCGCAA CAAAGATGTC AGAGTGCGTA | |
| | 6201 | TTGGGACAAT CTAAGAGGGT CGACTTTTGT GGAAAGGGGT ATCACTTGAT | |
| | 6251 | GTCCTTTCCT CAATCTGCAC CACACGGAGT TGTCTTCTTA CATGTAACAT | |
| | 6301 | ATGTGCCCGC TCAAGAAAAG AATTTCACTA CAGCACCTGC AATATGTCAT | |
| | 6351 | GACGGAAAAG CACATTTTCC TCGGGAGGGA GTTTTCGTTT CTAATGGAAC | |
| | 6401 | CCATTGGTTC GTGACCCAAA GGAACTTTTA CGAGCCTCAA ATAATTACAA | |
| | 6451 | CTGATAATAC ATTCGTTTCT GGAAATTGCG ACGTAGTTAT AGGTATTGTA | |
| | 6501 | AATAATACTG TTTATGACCC TTTACAACCT GAACTCGATT CCTTCAAGGA | |
| | 6551 | AGAACTCGAC AAATATTTTA AGAATCACAC CTCACCGGAC GTTGACTTAG | |
| | 6601 | GAGACATTTC CGGGATTAAC GCTAGTGTAG TCAATATCCA AAAGGAGATA | |
| | 6651 | GATAGACTGA ATGAGGTAGC AAAGAATCTT AATGAATCTT TGATCGACCT | |
| | 6701 | TCAGGAGCTG GGGAAGTACG AACAATACAT AAAATGGCCA TGGTACATTT | |
| | 6751 | GGCTCGGGTT TATTGCTGGA CTAATTGCAA TAGTCATGGT CACTATCATG | |
| | 6801 | CTGTGTTGTA TGACATCGTG CTGCTCATGC CTCAAGGGAT GTTGTAGCTG | |
| | 6851 | TTGATCTTGT TGCAAGTTCG ATGAGGATGA TTCAGAACCA GTTTTAAAAG | |
| | 6901 | GAGTAAAGTT GCATTACACA TAAAGGCTAG CTGTTTACGC GTTATCCATG | |
| | 6951 | CTCAAAGAGG CCTCAATTAT ATTTGAGTTT TTAATTTTTA TGAAAAAAAC | |
| | 7001 | TAACAGCAAT CATGGAAGTC CACGATTTTG AGACCGACGA GTTCAATGAT | |
| | 7051 | TTCAATGAAG ATGACTATGC CACAAGAGAA TTCCTGAATC CCGATGAGCG | |
| | 7101 | CATGACGTAC TTGAATCATG CTGATTACAA CCTGAATTCT CCTCTAATTA | |
| | 7151 | GTGATGATAT TGACAATTTA ATCAGGAAAT TCAATTCTCT TCCAATTCCC | |
| | 7201 | TCGATGTGGG ATAGTAAGAA CTGGGATGGA GTTCTTGAGA TGTTAACGTC | |
| | 7251 | ATGTCAAGCC AATCCCATCC CAACATCTCA GATGCATAAA TGGATGGGAA | |
| | 7301 | GTTGGTTAAT GTCTGATAAT CATGATGCCA GTCAAGGGTA TAGTTTTTTA | |
| | 7351 | CATGAAGTGG ACAAAGAGGC AGAAATAACA TTTGACGTGG TGGAGACCTT | |
| | 7401 | CATCCGCGGC TGGGGCAACA AACCAATTGA ATACATCAAA AAGGAAAGAT | |
| | 7451 | GGACTGACTC ATTCAAAATT CTCGCTTATT TGTGTCAAAA GTTTTTGGAC | |
| | 7501 | TTACACAAGT TGACATTAAT CTTAAATGCT GTCTCTGAGG TGGAATTGCT | |
| | 7551 | CAACTTGGCG AGGACTTTCA AAGGCAAAGT CAGAAGAAGT TCTCATGGAA | |
| | 7601 | CGAACATATG CAGGATTAGG GTTCCCAGCT TGGGTCCTAC TTTTATTTCA | |
| | 7651 | GAAGGATGGG CTTACTTCAA GAAACTTGAT ATTCTAATGG ACCGAAACTT | |
| | 7701 | TCTGTTAATG GTCAAAGATG TGATTATAGG GAGGATGCAA ACGGTGCTAT | |
| | 7751 | CCATGGTATG TAGAATAGAC AACCTGTTCT CAGAGCAAGA CATCTTCTCC | |
| | 7801 | CTTCTAAATA TCTACAGAAT TGGAGATAAA ATTGTGGAGA GGCAGGGAAA | |
| | 7851 | TTTTTCTTAT GACTTGATTA AAATGGTGGA ACCGATATGC AACTTGAAGC | |
| | 7901 | TGATGAAATT AGCAAGAGAA TCAAGGCCTT TAGTCCCACA ATTCCCTCAT | |
| | 7951 | TTTGAAAATC ATATCAAGAC TTCTGTTGAT GAAGGGGCAA AAATTGACCG | |
| | 8001 | AGGTATAAGA TTCCTCCATG ATCAGATAAT GAGTGTGAAA ACAGTGGATC | |
| | 8051 | TCACACTGGT GATTTATGGA TCGTTCAGAC ATTGGGGTCA TCCTTTTATA | |
| | 8101 | GATTATTACA CTGGACTAGA AAAATTACAT TCCCAAGTAA CCATGAAGAA | |
| | 8151 | AGATATTGAT GTGTCATATG CAAAAGCACT TGCAAGTGAT TTAGCTCGGA | |
| | 8201 | TTGTTCTATT TCAACAGTTC AATGATCATA AAAAGTGGTT CGTGAATGGA | |
| | 8251 | GACTTGCTCC CTCATGATCA TCCCTTTAAA AGTCATGTTA AAGAAAATAC | |
| | 8301 | ATGGCCCACA GCTGCTCAAG TTCAAGATTT TGGAGATAAA TGGCATGAAC | |
| | 8351 | TTCCGCTGAT TAAATGTTTT GAAATACCCG ACTTACTAGA CCCATCGATA | |
| | 8401 | ATATACTCTG ACAAAAGTCA TTCAATGAAT AGGTCAGAGG TGTTGAAACA | |
| | 8451 | TGTCCGAATG AATCCGAACA CTCCTATCCC TAGTAAAAAG GTGTTGCAGA | |
| | 8501 | CTATGTTGGA CACAAAGGCT ACCAATTGGA AAGAATTTCT TAAAGAGATT | |
| | 8551 | GATGAGAAGG GCTTAGATGA TGATGATCTA ATTATTGGTC TTAAAGGAAA | |
| | 8601 | GGAGAGGGAA CTGAAGTTGG CAGGTAGATT TTTCTCCCTA ATGTCTTGGA | |
| | 8651 | AATTGCGAGA ATACTTTGTA ATTACCGAAT ATTTGATAAA GACTCATTTC | |
| | 8701 | GTCCCTATGT TTAAAGGCCT GACAATGGCG GACGATCTAA CTGCAGTCAT | |
| | 8751 | TAAAAAGATG TTAGATTCCT CATCCGGCCA AGGATTGAAG TCATATGAGG | |
| | 8801 | CAATTTGCAT AGCCAATCAC ATTGATTACG AAAAATGGAA TAACCACCAA | |
| | 8851 | AGGAAGTTAT CAAACGGCCC AGTGTTCCGA GTTATGGGCC AGTTCTTAGG | |
| | 8901 | TTATCCATCC TTAATCGAGA GAACTCATGA ATTTTTTGAG AAAAGTCTTA | |
| | 8951 | TATACTACAA TGGAAGACCA GACTTGATGC GTGTTCACAA CAACACACTG | |
| | 9001 | ATCAATTCAA CCTCCCAACG AGTTTGTTGG CAAGGACAAG AGGGTGGACT | |
| | 9051 | GGAAGGTCTA CGGCAAAAAG GATGGAGTAT CCTCAATCTA CTGGTTATTC | |
| | 9101 | AAAGAGAGGC TAAAATCAGA AACACTGCTG TCAAAGTCTT GGCACAAGGT | |
| | 9151 | GATAATCAAG TTATTTGCAC ACAGTATAAA ACGAAGAAAT CGAGAAACGT | |
| | 9201 | TGTAGAATTA CAGGGTGCTC TCAATCAAAT GGTTTCTAAT AATGAGAAAA | |
| | 9251 | TTATGACTGC AATCAAAATA GGGACAGGGA AGTTAGGACT TTTGATAAAT | |
| | 9301 | GACGATGAGA CTATGCAATC TGCAGATTAC TTGAATTATG GAAAAATACC | |
| | 9351 | GATTTTCCGT GGAGTGATTA GAGGGTTAGA GACCAAGAGA TGGTCACGAG | |
| | 9401 | TGACTTGTGT CACCAATGAC CAAATACCCA CTTGTGCTAA TATAATGAGC | |
| | 9451 | TCAGTTTCCA CAAATGCTCT CACCGTAGCT CATTTTGCTG AGAACCCAAT | |
| | 9501 | CAATGCCATG ATACAGTACA ATTATTTTGG GACATTTGCT AGACTCTTGT | |
| | 9551 | TGATGATGCA TGATCCTGCT CTTCGTCAAT CATTGTATGA AGTTCAAGAT | |
| | 9601 | AAGATACCAG GCTTGCACAG TTCTACTTTC AAATACGCCA TGTTGTATTT | |
| | 9651 | GGACCCTTCC ATTGGAGGAG TGTCGGGCAT GTCTTTGTCC AGGTTTTTGA | |
| | 9701 | TTAGAGCCTT CCCAGATCCC GTAACAGAAA GTCTCTCATT CTGGAGATTC | |
| | 9751 | ATCCATGTAC ATGCTCGAAG TGAGCATCTG AAGGAGATGA GTGCAGTATT | |
| | 9801 | TGGAAACCCC GAGATAGCCA AGTTTCGAAT AACTCACATA GACAAGCTAG | |
| | 9851 | TAGAAGATCC AACCTCTCTG AACATCGCTA TGGGAATGAG TCCAGCGAAC | |
| | 9901 | TTGTTAAAGA CTGAGGTTAA AAAATGCTTA ATCGAATCAA GACAAACCAT | |
| | 9951 | CAGGAACCAG GTGATTAAGG ATGCAACCAT ATATTTGTAT CATGAAGAGG | |
| | 10001 | ATCGGCTCAG AAGTTTCTTA TGGTCAATAA ATCCTCTGTT CCCTAGATTT | |
| | 10051 | TTAAGTGAAT TCAAATCAGG CACTTTTTTG GGAGTCGCAG ACGGGCTCAT | |
| | 10101 | CAGTCTATTT CAAAATTCTC GTACTATTCG GAACTCCTTT AAGAAAAAGT | |
| | 10151 | ATCATAGGGA ATTGGATGAT TTGATTGTGA GGAGTGAGGT ATCCTCTTTG | |
| | 10201 | ACACATTTAG GGAAACTTCA TTTGAGAAGG GGATCATGTA AAATGTGGAC | |
| | 10251 | ATGTTCAGCT ACTCATGCTG ACACATTAAG ATACAAATCC TGGGGCCGTA | |
| | 10301 | CAGTTATTGG GACAACTGTA CCCCATCCAT TAGAAATGTT GGGTCCACAA | |
| | 10351 | CATCGAAAAG AGACTCCTTG TGCACCATGT AACACATCAG GGTTCAATTA | |
| | 10401 | TGTTTCTGTG CATTGTCCAG ACGGGATCCA TGACGTCTTT AGTTCACGGG | |
| | 10451 | GACCATTGCC TGCTTATCTA GGGTCTAAAA CATCTGAATC TACATCTATT | |
| | 10501 | TTGCAGCCTT GGGAAAGGGA AAGCAAAGTC CCACTGATTA AAAGAGCTAC | |
| | 10551 | ACGTCTTAGA GATGCTATCT CTTGGTTTGT TGAACCCGAC TCTAAACTAG | |
| | 10601 | CAATGACTAT ACTTTCTAAC ATCCACTCTT TAACAGGCGA AGAATGGACC | |
| | 10651 | AAAAGGCAGC ATGGGTTCAA AAGAACAGGG TCTGCCCTTC ATAGGTTTTC | |
| | 10701 | GACATCTCGG ATGAGCCATG GTGGGTTCGC ATCTCAGAGC ACTGCAGCAT | |
| | 10751 | TGACCAGGTT GATGGCAACT ACAGACACCA TGAGGGATCT GGGAGATCAG | |
| | 10801 | AATTTCGACT TTTTATTCCA AGCAACGTTG CTCTATGCTC AAATTACCAC | |
| | 10851 | CACTGTTGCA AGAGACGGAT GGATCACCAG TTGTACAGAT CATTATCATA | |
| | 10901 | TTGCCTGTAA GTCCTGTTTG AGACCCATAG AAGAGATCAC CCTGGACTCA | |
| | 10951 | AGTATGGACT ACACGCCCCC AGATGTATCC CATGTGCTGA AGACATGGAG | |
| | 11001 | GAATGGGGAA GGTTCGTGGG GACAAGAGAT AAAACAGATA TATCCTTTAG | |
| | 11051 | AAGGGAATTG GAAGAATTTA GCACCTGCTG AGCAATCCTA TCAAGTCGGC | |
| | 11101 | AGATGTATAG GTTTTCTATA TGGAGACTTG GCGTATAGAA AATCTACTCA | |
| | 11151 | TGCCGAGGAC AGTTCTCTAT TTCCTCTATC TATACAAGGT CGTATTAGAG | |
| | 11201 | GTCGAGGTTT CTTAAAAGGG TTGCTAGACG GATTAATGAG AGCAAGTTGC | |
| | 11251 | TGCCAAGTAA TACACCGGAG AAGTCTGGCT CATTTGAAGA GGCCGGCCAA | |
| | 11301 | CGCAGTGTAC GGAGGTTTGA TTTACTTGAT TGATAAATTG AGTGTATCAC | |
| | 11351 | CTCCATTCCT TTCTCTTACT AGATCAGGAC CTATTAGAGA CGAATTAGAA | |
| | 11401 | ACGATTCCCC ACAAGATCCC AACCTCCTAT CCGACAAGCA ACCGTGATAT | |
| | 11451 | GGGGGTGATT GTCAGAAATT ACTTCAAATA CCAATGCCGT CTAATTGAAA | |
| | 11501 | AGGGAAAATA CAGATCACAT TATTCACAAT TATGGTTATT CTCAGATGTC | |
| | 11551 | TTATCCATAG ACTTCATTGG ACCATTCTCT ATTTCCACCA CCCTCTTGCA | |
| | 11601 | AATCCTATAC AAGCCATTTT TATCTGGGAA AGATAAGAAT GAGTTGAGAG | |
| | 11651 | AGCTGGCAAA TCTTTCTTCA TTGCTAAGAT CAGGAGAGGG GTGGGAAGAC | |
| | 11701 | ATACATGTGA AATTCTTCAC CAAGGACATA TTATTGTGTC CAGAGGAAAT | |
| | 11751 | CAGACATGCT TGCAAGTTCG GGATTGCTAA GGATAATAAT AAAGACATGA | |
| | 11801 | GCTATCCCCC TTGGGGAAGG GAATCCAGAG GGACAATTAC AACAATCCCT | |
| | 11851 | GTTTATTATA CGACCACCCC TTACCCAAAG ATGCTAGAGA TGCCTCCAAG | |
| | 11901 | AATCCAAAAT CCCCTGCTGT CCGGAATCAG GTTGGGCCAA TTACCAACTG | |
| | 11951 | GCGCTCATTA TAAAATTCGG AGTATATTAC ATGGAATGGG AATCCATTAC | |
| | 12001 | AGGGACTTCT TGAGTTGTGG AGACGGCTCC GGAGGGATGA CTGCTGCATT | |
| | 12051 | ACTACGAGAA AATGTGCATA GCAGAGGAAT ATTCAATAGT CTGTTAGAAT | |
| | 12101 | TATCAGGGTC AGTCATGCGA GGCGCCTCTC CTGAGCCCCC CAGTGCCCTA | |
| | 12151 | GAAACTTTAG GAGGAGATAA ATCGAGATGT GTAAATGGTG AAACATGTTG | |
| | 12201 | GGAATATCCA TCTGACTTAT GTGACCCAAG GACTTGGGAC TATTTCCTCC | |
| | 12251 | GACTCAAAGC AGGCTTGGGG CTTCAAATTG ATTTAATTGT AATGGATATG | |
| | 12301 | GAAGTTCGGG ATTCTTCTAC TAGCCTGAAA ATTGAGACGA ATGTTAGAAA | |
| | 12351 | TTATGTGCAC CGGATTTTGG ATGAGCAAGG AGTTTTAATC TACAAGACTT | |
| | 12401 | ATGGAACATA TATTTGTGAG AGCGAAAAGA ATGCAGTAAC AATCCTTGGT | |
| | 12451 | CCCATGTTCA AGACGGTCGA CTTAGTTCAA ACAGAATTTA GTAGTTCTCA | |
| | 12501 | AACGTCTGAA GTATATATGG TATGTAAAGG TTTGAAGAAA TTAATCGATG | |
| | 12551 | AACCCAATCC CGATTGGTCT TCCATCAATG AATCCTGGAA AAACCTGTAC | |
| | 12601 | GCATTCCAGT CATCAGAACA GGAATTTGCC AGAGCAAAGA AGGTTAGTAC | |
| | 12651 | ATACTTTACC TTGACAGGTA TTCCCTCCCA ATTCATTCCT GATCCTTTTG | |
| | 12701 | TAAACATTGA GACTATGCTA CAAATATTCG GAGTACCCAC GGGTGTGTCT | |
| | 12751 | CATGCGGCTG CCTTAAAATC ATCTGATAGA CCTGCAGATT TATTGACCAT | |
| | 12801 | TAGCCTTTTT TATATGGCGA TTATATCGTA TTATAACATC AATCATATCA | |
| | 12851 | GAGTAGGACC GATACCTCCG AACCCCCCAT CAGATGGAAT TGCACAAAAT | |
| | 12901 | GTGGGGATCG CTATAACTGG TATAAGCTTT TGGCTGAGTT TGATGGAGAA | |
| | 12951 | AGACATTCCA CTATATCAAC AGTGTTTAGC AGTTATCCAG CAATCATTCC | |
| | 13001 | CGATTAGGTG GGAGGCTGTT TCAGTAAAAG GAGGATACAA GCAGAAGTGG | |
| | 13051 | AGTACTAGAG GTGATGGGCT CCCAAAAGAT ACCCGAATTT CAGACTCCTT | |
| | 13101 | GGCCCCAATC GGGAACTGGA TCAGATCTCT GGAATTGGTC CGAAACCAAG | |
| | 13151 | TTCGTCTAAA TCCATTCAAT GAGATCTTGT TCAATCAGCT ATGTCGTACA | |
| | 13201 | GTGGATAATC ATTTGAAATG GTCAAATTTG CGAAGAAACA CAGGAATGAT | |
| | 13251 | TGAATGGATC AATAGACGAA TTTCAAAAGA AGACCGGTCT ATACTGATGT | |
| | 13301 | TGAAGAGTGA CCTACACGAG GAAAACTCTT GGAGAGATTA AAAAATCATG | |
| | 13351 | AGGAGACTCC AAACTTTAAG TATGAAAAAA ACTTTGATCC TTAAGACCCT | |
| | 13401 | CTTGTGGTTT TTATTTTTTA TCTGGTTTTG TGGTCTTCGT | |
| Amino acid sequence for VSV- | Please see FIGS. 21B, 22B, 23B, and 24B. | | 155 |
| N protein in rVSVΔG-SARS- | | | |
| CoV-2 clones MB1 and MB2, | | | |
| and Vectors A and B | | | |
| Amino acid sequence for VSV- | Please see FIGS. 21C, 22C, 23C, and 24C. | | 156 |
| P protein in rVSVΔG-SARS- | | | |
| CoV-2 clones MB1 and MB2, | | | |
| and Vectors A and B | | | |
| Amino acid sequence for VSV- | Please see FIGS. 21D, 22D, and 23D. | | 157 |
| M protein in rVSVΔG-SARS- | | | |
| CoV-2 clone MB2, and Vectors | | | |
| A and B | | | |
| Amino acid sequence for | Please see FIG. 21E. | | 158 |
| SARS-CoV-2 S protein in | | | |
| rVSVΔG-SARS-CoV-2 clone | | | |
| MB2 | | | |
| Nucleotide sequence for | 1 | acgaagacaa acaaaccatt attatcatta aaaggctcag gagaaacttt aacagtaatc | 159 |
| rVSVΔG-SARS-CoV-2 with | 61 | aaaatgtctg ttacagtcaa gagaatcatt gacaacacag tcgtagttcc aaaacttcct | |
| codon-optimized, wild-type | 121 | gcaaatgagg atccagtgga atacccggca gattacttca gaaaatcaaa ggagattcct | |
| S protein | 181 | ctttacatca atactacaaa aagtttgtca gatctaagag gatatgtcta ccaaggcctc | |
| | 241 | aaatccggaa atgtatcaat catacatgtc aacagctact tgtatggagc attaaaggac | |
| | 301 | atccggggta agttggataa agattggtca agtttcggaa taaacatcgg gaaagcaggg | |
| | 361 | gatacaatcg gaatatttga ccttgtatcc ttgaaagccc tggacggcgt acttccagat | |
| | 421 | ggagtatcgg atgcttccag aaccagcgca gatgacaaat ggttgccttt gtatctactt | |
| | 481 | ggcttataca gagtgggcag aacacaaatg cctgaataca gaaaaaagct catggatggg | |
| | 541 | ctgacaaatc aatgcaaaat gatcaatgaa cagtttgaac ctcttgtgcc agaaggtcgt | |
| | 601 | gacatttttg atgtgtgggg aaatgacagt aattacacaa aaattgtcgc tgcagtggac | |
| | 661 | atgttcttcc acatgttcaa aaaacatgaa tgtgcctcgt tcagatacgg aactattgtt | |
| | 721 | tccagattca aagattgtgc tgcattggca acatttggac acctctgcaa aataaccgga | |
| | 781 | atgtctacag aagatgtaac gacctggatc ttgaaccgag aagttgcaga tgaaatggtc | |
| | 841 | caaatgatgc ttccaggcca agaaattgac aaggccgatt catacatgcc ttatttgatc | |
| | 901 | gactttggat tgtcttctaa gtctccatat tcttccgtca aaaaccctgc cttccacttc | |
| | 961 | tgggggcaat tgacagctct tctgctcaga tccaccagag caaggaatgc ccgacagcct | |
| | 1021 | gatgacattg agtatacatc tcttactaca gcaggtttgt tgtacgctta tgcagtagga | |
| | 1081 | tcctctgccg acttggcaca acagttttgt gttggagata acaaatacac tccagatgat | |
| | 1141 | agtaccggag gattgacgac taatgcaccg ccacaaggca gagatgtggt cgaatggctc | |
| | 1201 | ggatggtttg aagatcaaaa cagaaaaccg actcctgata tgatgcagta tgcgaaaaga | |
| | 1261 | gcagtcatgt cactgcaagg cctaagagag aagacaattg gcaagtatgc taagtcagaa | |
| | 1321 | tttgacaaat gaccctataa ttctcagatc acctattata tattatgcta catatgaaaa | |
| | 1381 | aaactaacag atatcatgga taatctcaca aaagttcgtg agtatctcaa gtcctattct | |
| | 1441 | cgtctggatc aggcggtagg agagatagat gagatcgaag cacaacgagc tgaaaagtcc | |
| | 1501 | aattatgagt tgttccaaga ggatggagtg gaagagcata ctaagccctc ttattttcag | |
| | 1561 | gcagcagatg attctgacac agaatctgaa ccagaaattg aagacaatca aggcttgtat | |
| | 1621 | gcaccagatc cagaagctga gcaagttgaa ggctttatac aggggccttt agatgactat | |
| | 1681 | gcagatgagg aagtggatgt tgtatttact tcggactgga aacagcctga gcttgaatct | |
| | 1741 | gacgagcatg gaaagacctt acggttgaca tcgccagagg gtttaagtgg agagcagaaa | |
| | 1801 | tcccagtggc tttcgacgat taaagcagtc gtgcaaagtg ccaaatactg gaatctggca | |
| | 1861 | gagtgcacat ttgaagcatc gggagaaggg gtcattatga aggagcgcca gataactccg | |
| | 1921 | gatgtatata aggtcactcc agtgatgaac acacatccgt cccaatcaga agcagtatca | |
| | 1981 | gatgtttggt ctctctcaaa gacatccatg actttccaac ccaagaaagc aagtcttcag | |
| | 2041 | cctctcacca tatccttgga tgaattgttc tcatctagag gagagttcat ctctgtcgga | |
| | 2101 | ggtgacggac gaatgtctca taaagaggcc atcctgctcg gcctgagata caaaaagttg | |
| | 2161 | tacaatcagg cgagagtcaa atattctctg tagactatga aaaaaagtaa cagatatcac | |
| | 2221 | gatctaagtg ttatcccaat ccattcatca tgagttcctt aaagaagatt ctcggtctga | |
| | 2281 | aggggaaagg taagaaatct aagaaattag ggatcgcacc acccccttat gaagaggaca | |
| | 2341 | ctagcatgga gtatgctccg agcgctccaa ttgacaaatc ctattttgga gttgacgaga | |
| | 2401 | tggacaccta tgatccgaat caattaagat atgagaaatt cttctttaca gtgaaaatga | |
| | 2461 | cggttagatc taatcgtccg ttcagaacat actcagatgt ggcagccgct gtatcccatt | |
| | 2521 | gggatcacat gtacatcgga atggcaggga aacgtccctt ctacaaaatc ttggcttttt | |
| | 2581 | tgggttcttc taatctaaag gccactccag cggtattggc agatcaaggt caaccagagt | |
| | 2641 | atcacgctca ctgcgaaggc agggcttatt tgccacatag gatggggaag acccctccca | |
| | 2701 | tgctcaatgt accagagcac ttcagaagac cattcaatat aggtctttac aagggaacga | |
| | 2761 | ttgagctcac aatgaccatc tacgatgatg agtcactgga agcagctcct atgatctggg | |
| | 2821 | atcatttcaa ttcttccaaa ttttctgatt tcagagagaa ggccttaatg tttggcctga | |
| | 2881 | ttgtcgagaa aaaggcatct ggagcgtggg tcctggactc tatcggccac ttcaaatgag | |
| | 2941 | ctagtctaac ttctagcttc tgaacaatcc ccggtttact cagtctcccc taattccagc | |
| | 3001 | ctctcgaaca actaatatcc tgtcttttct atccctatga aaaaaactaa cagagatcga | |
| | 3061 | tctgtttacg cgctagtgga tcctactcga gaggagccac catgttcgtg ttcctggtgc | |
| | 3121 | tattacctct ggtttcgtct caatgcgtaa accttacaac tagaactcag cttcctccag | |
| | 3181 | catacacaaa ttccttcact cgcggagtgt attatcctga taaggtcttt cgatcatcag | |
| | 3241 | tgttgcattc cacccaggat ttgtttctcc cgttcttttc aaatgtaact tggttccatg | |
| | 3301 | ctatacatgt ttccggaacc aatggaacaa agagatttga taacccagtg ttaccattta | |
| | 3361 | acgacggagt ttatttcgca tcaactgaga aatccaatat cattagaggc tggattttcg | |
| | 3421 | gaacgaccct ggattctaaa acgcaatcct tgctgattgt taataatgca acaaatgtgg | |
| | 3481 | tcattaaagt ctgtgaattc caattttgca atgatccatt tctcggcgtc tattaccaca | |
| | 3541 | agaataacaa atcttggatg gagtcagagt tcagggttta tagttccgca aataattgta | |
| | 3601 | cttttgaata cgtttcccaa ccattcttaa tggacttgga gggaaaacag ggaaatttta | |
| | 3661 | agaatctaag agaattcgtc tttaagaata ttgatggata tttcaagatc tattcaaaac | |
| | 3721 | atacacctat aaacctagtt agagatctcc cgcaagggtt ttcagcccta gagccactag | |
| | 3781 | ttgacctgcc aattgggatc aacattacta gattccagac cctactcgct ctgcatcggt | |
| | 3841 | catatttgac accaggagat tcatcgtcag gatggaccgc tggagcagct gcttactatg | |
| | 3901 | ttgggtatct gcaacctaga acatttctcc taaagtataa tgaaaacggg actattacag | |
| | 3961 | acgcagtcga ttgcgcactg gatccactct cagagacaaa gtgcactcta aaatcattca | |
| | 4021 | ctgtcgagaa aggaatctat caaacatcaa atttcagggt ccagccaact gagagtattg | |
| | 4081 | tccggttccc taacataact aacttgtgcc ccttcggaga ggttttcaat gctactcggt | |
| | 4141 | tcgccagcgt ctacgcatgg aacagaaaga ggatttcaaa ctgtgtcgca gattatagcg | |
| | 4201 | tcctctataa ttcagcatca ttcagtacat ttaaatgcta tggtgtcagc cccaccaaac | |
| | 4261 | ttaatgactt atgttttacc aatgtatatg cagattcctt tgtaatcaga ggtgacgaag | |
| | 4321 | tgaggcaaat cgcacctgga cagaccggaa agattgctga ttataattat aaactccctg | |
| | 4381 | atgattttac cggatgtgtt attgcttgga acagcaataa cctcgatagt aaggtcggag | |
| | 4441 | gaaactataa ctatttgtac agactgttta gaaagtcgaa tttgaaacct tttgaaagag | |
| | 4501 | acatatccac cgagatttac caggcgggca gcacaccgtg taatggtgta gaaggattca | |
| | 4561 | attgttactt tcccctgcaa tcatatgggt ttcaaccaac caatggagtc ggatatcaac | |
| | 4621 | catatcgtgt cgtcgtcctt tccttcgagc tgcttcatgc accagctaca gtctgcggac | |
| | 4681 | ctaagaagag cactaatctt gtcaagaaca aatgtgtgaa ctttaatttt aatggattaa | |
| | 4741 | caggaaccgg agttttgacc gagagtaata agaagttctt gccgttccag caatttggac | |
| | 4801 | gagacattgc tgacaccaca gatgcggttc gtgacccgca aactttagag atcctagaca | |
| | 4861 | tcaccccatg ttcattcggt ggagtttccg ttattactcc tggaacgaat acaagcaatc | |
| | 4921 | aagttgccgt tctctatcaa gatgttaatt gtacagaagt gcctgtggcc attcatgcag | |
| | 4981 | atcaactaac accaacttgg agagtttaca gcactgggtc caatgtcttc caaacgcgcg | |
| | 5041 | ccggctgcct cattggtgca gaacatgtga ataactcata cgaatgtgac attccaatcg | |
| | 5101 | gtgccggcat atgcgcctct taccagactc agactaattc gccaagaaga gccaggtctg | |
| | 5161 | tcgcaagtca gtcaattatt gcatacacaa tgtcgttagg agcagagaat agtgtagcat | |
| | 5221 | actcaaacaa ttctatagca atacctacca acttcactat atcagtaact acagaaatat | |
| | 5281 | tgccagtatc catgactaaa acaagtgtgg attgcaccat gtacatctgt ggagattcca | |
| | 5341 | cagaatgcag caatcttctc ttgcaatacg gatcattctg cacacaactg aatagggcac | |
| | 5401 | tgactggaat tgcagtcgag caggataaga acacacagga ggtgtttgcc caagtcaaac | |
| | 5461 | aaatatacaa aacaccaccc atcaaggatt ttggaggatt taatttctca caaatactcc | |
| | 5521 | ccgacccatc caagccctcc aaaaggagtt tcattgagga cctcttgttt aataaggtta | |
| | 5581 | ccttggcaga tgccgggttt attaagcagt acggcgactg tcttggagac atagcagcca | |
| | 5641 | gagatctaat ttgtgcccag aaattcaatg gactgacagt cctgcctccc ttattaactg | |
| | 5701 | atgagatgat agctcagtat acatcagcat tgttggctgg tacaattaca tctggatgga | |
| | 5761 | catttggtgc cggagcggca ttacaaatcc cttttgcaat gcaaatggcc tatagattta | |
| | 5821 | atggaatcgg agtaactcaa aatgttttat atgagaatca gaaattaatt gcaaatcaat | |
| | 5881 | tcaattcagc tataggaaag attcaggatt cactcagtag tacagcaagc gctctaggca | |
| | 5941 | aattacaaga cgtcgtcaat cagaatgcac aggcattaaa tacactggtg aagcaattga | |
| | 6001 | gttccaattt cggagcaatt tcatctgttc taaatgatat attgtcaaga ctggataaag | |
| | 6061 | tagaagccga ggtccaaatc gataggctga tcacaggaag acttcaatca ctacagacat | |
| | 6121 | acgtcaccca acaactcatc agagcagcag aaattagagc ctctgctaat ctagccgcaa | |
| | 6181 | caaagatgtc agagtgcgta ttgggacaat ctaagagggt cgacttttgt ggaaaggggt | |
| | 6241 | atcacttgat gtcctttcct caatctgcac cacacggagt tgtcttctta catgtaacat | |
| | 6301 | atgtgcccgc tcaagaaaag aatttcacta cagcacctgc aatatgtcat gacggaaaag | |
| | 6361 | cacattttcc tcgggaggga gttttcgttt ctaatggaac ccattggttc gtgacccaaa | |
| | 6421 | ggaactttta cgagcctcaa ataattacaa ctgataatac attcgtttct ggaaattgcg | |
| | 6481 | acgtagttat aggtattgta aataatactg tttatgaccc tttacaacct gaactcgatt | |
| | 6541 | ccttcaagga agaactcgac aaatatttta agaatcacac ctcaccggac gttgacttag | |
| | 6601 | gagacatttc cgggattaac gctagtgtag tcaatatcca aaaggagata gatagactga | |
| | 6661 | atgaggtagc aaagaatctt aatgaatctt tgatcgacct tcaggagctg gggaagtacg | |
| | 6721 | aacaatacat aaaatggcca tggtacattt ggctcgggtt tattgctgga ctaattgcaa | |
| | 6781 | tagtcatggt cactatcatg ctgtgttgta tgacatcgtg ctgctcatgc ctcaagggat | |
| | 6841 | gttgtagctg tggatcttgt tgcaagttcg atgaggatga ttcagaacca gttttaaaag | |
| | 6901 | gagtaaagtt gcattacaca taaaggctag ctgtttacgc gttatccatg ctcaaagagg | |
| | 6961 | cctcaattat atttgagttt ttaattttta tgaaaaaaaa ctaacagcaa tcatggaagt | |
| | 7021 | ccacgatttt gagaccgacg agttcaatga tttcaatgaa gatgactatg ccacaagaga | |
| | 7081 | attcctgaat cccgatgagc gcatgacgta cttgaatcat gctgattaca acctgaattc | |
| | 7141 | tcctctaatt agtgatgata ttgacaattt aatcaggaaa ttcaattctc ttccaattcc | |
| | 7201 | ctcgatgtgg gatagtaaga actgggatgg agttcttgag atgttaacgt catgtcaagc | |
| | 7261 | caatcccatc ccaacatctc agatgcataa atggatggga agttggttaa tgtctgataa | |
| | 7321 | tcatgatgcc agtcaagggt atagtttttt acatgaagtg gacaaagagg cagaaataac | |
| | 7381 | atttgacgtg gtggagacct tcatccgcgg ctggggcaac aaaccaattg aatacatcaa | |
| | 7441 | aaaggaaaga tggactgact cattcaaaat tctcgcttat ttgtgtcaaa agtttttgga | |
| | 7501 | cttacacaag ttgacattaa tcttaaatgc tgtctctgag gtggaattgc tcaacttggc | |
| | 7561 | gaggactttc aaaggcaaag tcagaagaag ttctcatgga acgaacatat gcaggattag | |
| | 7621 | ggttcccagc ttgggtccta cttttatttc agaaggatgg gcttacttca agaaacttga | |
| | 7681 | tattctaatg gaccgaaact ttctgttaat ggtcaaagat gtgattatag ggaggatgca | |
| | 7741 | aacggtgcta tccatggtat gtagaataga caacctgttc tcagagcaag acatcttctc | |
| | 7801 | ccttctaaat atctacagaa ttggagataa aattgtggag aggcagggaa atttttctta | |
| | 7861 | tgacttgatt aaaatggtgg aaccgatatg caacttgaag ctgatgaaat tagcaagaga | |
| | 7921 | atcaaggcct ttagtcccac aattccctca ttttgaaaat catatcaaga cttctgttga | |
| | 7981 | tgaaggggca aaaattgacc gaggtataag attcctccat gatcagataa tgagtgtgaa | |
| | 8041 | aacagtggat ctcacactgg tgatttatgg atcgttcaga cattggggtc atccttttat | |
| | 8101 | agattattac actggactag aaaaattaca ttcccaagta accatgaaga aagatattga | |
| | 8161 | tgtgtcatat gcaaaagcac ttgcaagtga tttagctcgg attgttctat ttcaacagtt | |
| | 8221 | caatgatcat aaaaagtggt tcgtgaatgg agacttgctc cctcatgatc atccctttaa | |
| | 8281 | aagtcatgtt aaagaaaata catggcccac agctgctcaa gttcaagatt ttggagataa | |
| | 8341 | atggcatgaa cttccgctga ttaaatgttt tgaaataccc gacttactag acccatcgat | |
| | 8401 | aatatactct gacaaaagtc attcaatgaa taggtcagag gtgttgaaac atgtccgaat | |
| | 8461 | gaatccgaac actcctatcc ctagtaaaaa ggtgttgcag actatgttgg acacaaaggc | |
| | 8521 | taccaattgg aaagaatttc ttaaagagat tgatgagaag ggcttagatg atgatgatct | |
| | 8581 | aattattggt cttaaaggaa aggagaggga actgaagttg gcaggtagat ttttctccct | |
| | 8641 | aatgtcttgg aaattgcgag aatactttgt aattaccgaa tatttgataa agactcattt | |
| | 8701 | cgtccctatg tttaaaggcc tgacaatggc ggacgatcta actgcagtca ttaaaaagat | |
| | 8761 | gttagattcc tcatccggcc aaggattgaa gtcatatgag gcaatttgca tagccaatca | |
| | 8821 | cattgattac gaaaaatgga ataaccacca aaggaagtta tcaaacggcc cagtgttccg | |
| | 8881 | agttatgggc cagttcttag gttatccatc cttaatcgag agaactcatg aattttttga | |
| | 8941 | gaaaagtctt atatactaca atggaagacc agacttgatg cgtgttcaca acaacacact | |
| | 9001 | gatcaattca acctcccaac gagtttgttg gcaaggacaa gagggtggac tggaaggtct | |
| | 9061 | acggcaaaaa ggatggagta tcctcaatct actggttatt caaagagagg ctaaaatcag | |
| | 9121 | aaacactgct gtcaaagtct tggcacaagg tgataatcaa gttatttgca cacagtataa | |
| | 9181 | aacgaagaaa tcgagaaacg ttgtagaatt acagggtgct ctcaatcaaa tggtttctaa | |
| | 9241 | taatgagaaa attatgactg caatcaaaat agggacaggg aagttaggac ttttgataaa | |
| | 9301 | tgacgatgag actatgcaat ctgcagatta cttgaattat ggaaaaatac cgattttccg | |
| | 9361 | tggagtgatt agagggttag agaccaagag atggtcacga gtgacttgtg tcaccaatga | |
| | 9421 | ccaaataccc acttgtgcta atataatgag ctcagtttcc acaaatgctc tcaccgtagc | |
| | 9481 | tcattttgct gagaacccaa tcaatgccat gatacagtac aattattttg ggacatttgc | |
| | 9541 | tagactcttg ttgatgatgc atgatcctgc tcttcgtcaa tcattgtatg aagttcaaga | |
| | 9601 | taagatacca ggcttgcaca gttctacttt caaatacgcc atgttgtatt tggacccttc | |
| | 9661 | cattggagga gtgtcgggca tgtctttgtc caggtttttg attagagcct tcccagatcc | |
| | 9721 | cgtaacagaa agtctctcat tctggagatt catccatgta catgctcgaa gtgagcatct | |
| | 9781 | gaaggagatg agtgcagtat ttggaaaccc cgagatagcc aagtttcgaa taactcacat | |
| | 9841 | agacaagcta gtagaagatc caacctctct gaacatcgct atgggaatga gtccagcgaa | |
| | 9901 | cttgttaaag actgaggtta aaaaatgctt aatcgaatca agacaaacca tcaggaacca | |
| | 9961 | ggtgattaag gatgcaacca tatatttgta tcatgaagag gatcggctca gaagtttctt | |
| | 10021 | atggtcaata aatcctctgt tccctagatt tttaagtgaa ttcaaatcag gcactttttt | |
| | 10081 | gggagtcgca gacgggctca tcagtctatt tcaaaattct cgtactattc ggaactcctt | |
| | 10141 | taagaaaaag tatcataggg aattggatga tttgattgtg aggagtgagg tatcctcttt | |
| | 10201 | gacacattta gggaaacttc atttgagaag gggatcatgt aaaatgtgga catgttcagc | |
| | 10261 | tactcatgct gacacattaa gatacaaatc ctggggccgt acagttattg ggacaactgt | |
| | 10321 | accccatcca ttagaaatgt tgggtccaca acatcgaaaa gagactcctt gtgcaccatg | |
| | 10381 | taacacatca gggttcaatt atgtttctgt gcattgtcca gacgggatcc atgacgtctt | |
| | 10441 | tagttcacgg ggaccattgc ctgcttatct agggtctaaa acatctgaat ctacatctat | |
| | 10501 | tttgcagcct tgggaaaggg aaagcaaagt cccactgatt aaaagagcta cacgtcttag | |
| | 10561 | agatgctatc tcttggtttg ttgaacccga ctctaaacta gcaatgacta tactttctaa | |
| | 10621 | catccactct ttaacaggcg aagaatggac caaaaggcag catgggttca aaagaacagg | |
| | 10681 | gtctgccctt cataggtttt cgacatctcg gatgagccat ggtgggttcg catctcagag | |
| | 10741 | cactgcagca ttgaccaggt tgatggcaac tacagacacc atgagggatc tgggagatca | |
| | 10801 | gaatttcgac tttttattcc aagcaacgtt gctctatgct caaattacca ccactgttgc | |
| | 10861 | aagagacgga tggatcacca gttgtacaga tcattatcat attgcctgta agtcctgttt | |
| | 10921 | gagacccata gaagagatca ccctggactc aagtatggac tacacgcccc cagatgtatc | |
| | 10981 | ccatgtgctg aagacatgga ggaatgggga aggttcgtgg ggacaagaga taaaacagat | |
| | 11041 | ctatccttta gaagggaatt ggaagaattt agcacctgct gagcaatcct atcaagtcgg | |
| | 11101 | cagatgtata ggttttctat atggagactt ggcgtataga aaatctactc atgccgagga | |
| | 11161 | cagttctcta tttcctctat ctatacaagg tcgtattaga ggtcgaggtt tcttaaaagg | |
| | 11221 | gttgctagac ggattaatga gagcaagttg ctgccaagta atacaccgga gaagtctggc | |
| | 11281 | tcatttgaag aggccggcca acgcagtgta cggaggtttg atttacttga ttgataaatt | |
| | 11341 | gagtgtatca cctccattcc tttctcttac tagatcagga cctattagag acgaattaga | |
| | 11401 | aacgattccc cacaagatcc caacctccta tccgacaagc aaccgtgata tgggggtgat | |
| | 11461 | tgtcagaaat tacttcaaat accaatgccg tctaattgaa aagggaaaat acagatcaca | |
| | 11521 | ttattcacaa ttatggttat tctcagatgt cttatccata gacttcattg gaccattctc | |
| | 11581 | tatttccacc accctcttgc aaatcctata caagccattt ttatctggga aagataagaa | |
| | 11641 | tgagttgaga gagctggcaa atctttcttc attgctaaga tcaggagagg ggtgggaaga | |
| | 11701 | catacatgtg aaattcttca ccaaggacat attattgtgt ccagaggaaa tcagacatgc | |
| | 11761 | ttgcaagttc gggattgcta aggataataa taaagacatg agctatcccc cttggggaag | |
| | 11821 | ggaatccaga gggacaatta caacaatccc tgtttattat acgaccaccc cttacccaaa | |
| | 11881 | gatgctagag atgcctccaa gaatccaaaa tcccctgctg tccggaatca ggttgggcca | |
| | 11941 | attaccaact ggcgctcatt ataaaattcg gagtatatta catggaatgg gaatccatta | |
| | 12001 | cagggacttc ttgagttgtg gagacggctc cggagggatg actgctgcat tactacgaga | |
| | 12061 | aaatgtgcat agcagaggaa tattcaatag tctgttagaa ttatcagggt cagtcatgcg | |
| | 12121 | aggcgcctct cctgagcccc ccagtgccct agaaacttta ggaggagata aatcgagatg | |
| | 12181 | tgtaaatggt gaaacatgtt gggaatatcc atctgactta tgtgacccaa ggacttggga | |
| | 12241 | ctatttcctc cgactcaaag caggcttggg gcttcaaatt gatttaattg taatggatat | |
| | 12301 | ggaagttcgg gattcttcta ctagcctgaa aattgagacg aatgttagaa attatgtgca | |
| | 12361 | ccggattttg gatgagcaag gagttttaat ctacaagact tatggaacat atatttgtga | |
| | 12421 | gagcgaaaag aatgcagtaa caatccttgg tcccatgttc aagacggtcg acttagttca | |
| | 12481 | aacagaattt agtagttctc aaacgtctga agtatatatg gtatgtaaag gtttgaagaa | |
| | 12541 | attaatcgat gaacccaatc ccgattggtc ttccatcaat gaatcctgga aaaacctgta | |
| | 12601 | cgcattccag tcatcagaac aggaatttgc cagagcaaag aaggttagta catactttac | |
| | 12661 | cttgacaggt attccctccc aattcattcc tgatcctttt gtaaacattg agactatgct | |
| | 12721 | acaaatattc ggagtaccca cgggtgtgtc tcatgcggct gccttaaaat catctgatag | |
| | 12781 | acctgcagat ttattgacca ttagcctttt ttatatggcg attatatcgt attataacat | |
| | 12841 | caatcatatc agagtaggac cgatacctcc gaacccccca tcagatggaa ttgcacaaaa | |
| | 12901 | tgtggggatc gctataactg gtataagctt ttggctgagt ttgatggaga aagacattcc | |
| | 12961 | actatatcaa cagtgtttag cagttatcca gcaatcattc ccgattaggt gggaggctgt | |
| | 13021 | ttcagtaaaa ggaggataca agcagaagtg gagtactaga ggtgatgggc tcccaaaaga | |
| | 13081 | tacccgaatt tcagactcct tggccccaat cgggaactgg atcagatctc tggaattggt | |
| | 13141 | ccgaaaccaa gttcgtctaa atccattcaa tgagatcttg ttcaatcagc tatgtcgtac | |
| | 13201 | agtggataat catttgaaat ggtcaaattt gcgaagaaac acaggaatga ttgaatggat | |
| | 13261 | caatagacga atttcaaaag aagaccggtc tatactgatg ttgaagagtg acctacacga | |
| | 13321 | ggaaaactct tggagagatt aaaaaatcat gaggagactc caaactttaa gtatgaaaaa | |
| | 13381 | aactttgatc cttaagaccc tcttgtggtt tttatttttt atctggtttt gtggtcttcg | |
| | 13441 | t | |

| | | |
|---|---|---|
| Nucleotide sequence for | Please see FIG. 22F. | 160 |
| Vector A, which is a VSV | | |
| vector without the VSV-G | | |
| gene. | | |
| Nucleotide sequence for | Please see FIG. 23F. | 161 |
| Vector B, which is a VSV | | |
| vector without the VSV-G | | |
| gene. | | |
| Amino acid sequence of the | mfvflvllplvssqc | 162 |
| signal sequence (SS) of SEQ | | |
| ID NOS: 1, 4, 7, 10, 13, 16, | | |
| 19, and 22 | | |
| Amino acid sequence of the | yeqyikwpwyiw | 163 |
| membrane-proximal external | | |
| region (MPER) of SEQ ID | | |
| NOS: 1, 4, 7, 10, and 16 | | |
| Amino acid sequence of the | lgfiagliaivmvtiml | 164 |
| transmembrane region (TM) of | | |
| SEQ ID NOS: 1, 4, 7, and 16 | | |
| Amino acid sequence of the | ccmtsccsclkgccscgscckfdeddsepvlkgvklhyt | 165 |
| cytoplasmic tail (CT) of SEQ | | |
| ID NO: 1 | | |
| Kozak sequence of SEQ ID | aggagccacc | 166 |
| NOS: 2, 3, 5, 6, 8, 9, 11, | | |
| 12, 14, 15, 17, 18, 20, 21, | | |
| 23, and 24 | | |
| Nucleotide sequence encoding | atgttcgtgttcctggtgctattacctctggtttcgtctcaatgc | 167 |
| the SS of SEQ ID NOS: 2, 3, | | |
| 5, 6, 8, 9, 11, 12, 14, 15, | | |
| 17, 18, 20, 21, 23, and 24 | | |
| Nucleotide sequence encoding | tacgaacaatacataaaatggccatggtacatttgg | 168 |
| the MPER of SEQ ID NOS: 2, | | |
| 3, 5, 6, 8, 9, 11, 12, 17, | | |
| and 18 | | |
| Nucleotide sequence encoding | ctcgggtttattgctggactaattgcaatagtcatggtcactatcatgctg | 169 |
| the TM of SEQ ID NOS: 2, 3, | | |
| 5, 6, 8, 9, 17, and 18 | | |
| Nucleotide sequence encoding | tgttgtatgacatcgtgctgctcatgcctcaagggatgttgtagctgtggatcttgttgcaagttcg | 170 |
| the CT of SEQ ID NOS: 2 and | atgaggatgattcagaaccagttttaaaaggagtaaagttgcattacaca | |
| 3 | | |
| Amino acid sequence of the | ccmtsccs | 171 |
| CT of SEQ ID NO: 4 | | |
| Nucleotide sequence encoding | tgttgtatgacatcgtgctgctca | 172 |
| the CT of SEQ ID NOS: 5 and | | |
| 6 | | |
| Amino acid sequence of the | rvgiylciklkhtkkrqiytdiemnrlgk | 173 |
| Vector B VSV-G-CT IND | | |
| serotype of SEQ ID NOS: 7, | | |
| 10, 13, and 19 | | |
| Nucleotide sequence encoding | cgagttggtatttatctttgcattaaattaaagcacaccaagaaaagacagatttatacagacatag | 174 |
| the Vector B VSV-G-CT IND | agatgaaccgacttggaaag | |
| serotype sequence of SEQ ID | | |
| NOS: 8, 9, 11, 12, 14, 15, | | |
| 20, and 21 | | |
| Amino acid sequence of the | ssiasfffiigliiglflvl | 175 |
| Vector B VSV-G-TM IND | | |
| serotype of SEQ ID NOS: 10 | | |
| and 13 | | |
| Nucleotide sequence encoding | agctctattgcctcttttttctttatcatagggttaatcattggactattcttggttctc | 176 |
| the Vector B VSV-G-TM IND | | |
| serotype sequence of SEQ ID | | |
| NOS: 11, 12, 14, and 15 | | |
| Amino acid sequence of the | yeqyik | 177 |
| MPER of SEQ ID NOS: 13, 19, | | |
| and 22 | | |
| Nucleotide sequence encoding | tacgaacaatacataaaa | 178 |
| the MPER of SEQ ID NOS: 14 | | |
| and 15 | | |
| Amino acid sequence of the | ccmtsccsclkgccscgs | 179 |
| CT of SEQ ID NO: 16 | | |
| Nucleotide sequence encoding | tgttgtatgacatcgtgctgctcatgcctcaagggatgttgtagctgtggatct | 180 |
| the CT of SEQ ID NOS: 17 and | | |
| 18 | | |
| Amino acid sequence of the | WPWYIWLGFIAGLIAIVMVTIML | 181 |
| TM of SEQ ID NOS: 19 and 22 | | |
| Amino acid sequence of the | CCMTSCCSCLKGCCSCGSCC | 182 |
| CT of SEQ ID NOS: 19 and 22 | | |
| Nucleotide sequence encoding | tggccatggtacatttggctcgggtttattgctggactaattgcaatagtcatggtcactatcatgctg | 183 |
| the TM of SEQ ID NOS: 20, | | |
| 21, 23, and 24 | | |
| Nucleotide sequence encoding | tgttgtatgacatcgtgctgctcatgcctcaagggatgttgtagctgtggatcttgttgc | 184 |
| the CT of SEQ ID NOS: 20, 21, | | |
| 23, and 24 | | |
| Amino acid sequence for the | KLKHTKKRQIYTDIEMNRLGK | 185 |
| Vector B VSV-G-CT IND | | |
| serotype of SEQ ID NO: 22 | | |
| Nucleotide sequence encoding | aaattaaagcacaccaagaaaagacagatttatacagacatagagatgaaccgacttggaaag | 186 |
| the Vector B VSV-G-CT IND | | |
| serotype sequence of SEQ ID | | |
| NO: 23 and 24 | | |
| VSV-G-TM-CT segment of | SSIASFFFII GLIIGLFLVL RVGIHLCIKL KHTKKRQIYT DIEMNRLGK | 187 |
| Vector A | | |
| VSV-G-TM-CT segment of | SSIASFFFII GLIIGLFLVL RVGIYLCIKL KHTKKRQIYT DIEMNRLGK | 188 |
| Vector B | | |
| Leader sequence 1 | NEVAKNLNESLIDLGELGK | 189 |
| Leader sequence 2 | TLFFGDTGLSKNPIEFVEGWFSSWK | 190 |
| A segment of VSV-G | TLFFGDTGLSKNPIEFVEGWFSSWKSSIASFFFTIGLIIGLFLVLRVGIYLCIKLKHTKKRQIYTDIEM | 191 |
| | NRLGK | |
| Nucleotide sequence encoding | tacgaacaatacataaaa | 192 |
| the MPER of SEQ ID NOS: 20 | | |
| and 23 | | |
| A portion of the C-terminus | GSCCKFDEDDSEPVLKGVKLHYT | 193 |
| of SARS-CoV-2 S protein | | |
| A SNP at position 6993 | gaaaaaaaac | 194 |

### BRIEF DESCRIPTION OF THE DRAWINGS

[0162] FIGS. 1A-1Y show amino acid and nucleotide sequences. 1A-1X show amino acid sequences and nucleotide sequences of Constructs 1-8 which are as follows: Construct 1: wild-type (wt) SARS-CoV-2 S protein (S_WILD-TYPE) (FIGS. 1A-C); Construct 2: SARS-CoV-2 S protein with CT deletion (S_ACT31) (FIGS. 1D-F); Construct 3: SARS-CoV-2 S protein with VSVG-CT Indiana (IND) serotype (S-VSV-Gct) (FIGS. 1G-I); Construct 4: SARS-CoV-2 S protein with VSVG-TM-CT IND serotype (S_VSV-Gtmct) (FIGS. 1J-L); Construct 5: SARS-CoV-2 S protein with MPER6aa and VSVG-TM-CT IND serotype (S_VSV_Gtm-ctamper6) (FIGS. 1M-O); Construct 6: SARS-CoV-2 S protein with dCt21 (S_Δ21) (FIGS. 1P-R); Construct 7: SARS-CoV-2 S protein with dCt19 and VSVGct (S_ΔCT19_Gct) (FIGS. 1S-U); and Construct 8: SARS-CoV-2 S protein with dCt19 and VSVGct21 FIG. 1 (V-X). In FIG. 1G, the cytoplasmic tail of SARS-CoV-2 S protein is swapped with the VSV-G cytoplasmic tail. In FIG. 1J, the cytoplasmic tail and transmembrane domain of SARS-CoV-2 S protein are swapped with the cytoplasmic tail and transmembrane domain of VSV-G. FIG. 1Y shows comparison of Vector A and Vector B sequences for the VSVG-TM-CT segment. Vector A is based on GenBank Accession number EA043260. Vector B is based on GenBank MO746802 and was developed by modifying sequences in GenBank Accession number EF197793. While both Vectors A and B are of the VSV IND serotype, they have different amino acids at position 25. Vector A VSVG-TM-CT (SEQ ID NO: 187) comprises His25 (underlined) while Vector B VSVG-TM-CT (SEQ ID NO: 188) comprises Tyr25 (underlined). Vector B VSV-G-TM-CT (SEQ ID NO: 188) may also be found at amino acid position number 1218 to amino acid position number 1266 of SEQ ID NO: 10, and at amino acid position number 1212 to amino acid position number 1260 of SEQ ID NO: 13. WT, wild type; SS, signal peptide sequence; MPER, membrane-proximal external region; TM, transmembrane region; CT, cytoplasmic tail. The Kozak sequence is an additional 10 nucleotides before (i.e., 5′ of) the start codon which may help control translation of the protein. Sequences are written from N-to-C terminus or 5′ to 3′, for amino acid or nucleic acid sequences, respectively.

[0163] FIG. 2 shows alignment of 42 full-length SARS-CoV-2 S protein amino acid variant sequences. A consensus sequence is shown at the bottom of the alignment. The number on the left of each sequence is the GenBank Accession Number for the corresponding SARS-CoV-2 S protein. Sequences are written from N-to-C terminus. The nucleotide sequences for SARS-CoV-2 S protein variants shown here are incorporated by reference from Genbank. Point mutations within each variant are shown with black text and white highlight. Point mutations in the consensus sequence are shown in lowercase underlined. QHO60594 is the source sequence for SARS-CoV-2 S protein and is identified with an underline.

[0164] FIG. 3 is a phylogenic tree showing the country of origin for each corresponding SARS-CoV-2 in the alignment in FIG. 2. QHO60594 is the source sequence for SARS-CoV-2 S protein and is identified with an underline.

[0165] FIG. 4 illustrates rational design of a VSVΔG-SARS-CoV-2 recombinant viral particle, wherein the VSV glycoprotein (VSV-G) is replaced by SARS-CoV-2 S protein or variants thereof. S adaptive refers to SARS-CoV-2 S proteins that comprise adaptive mutations after passaging in the cells.

[0166] FIG. 5 shows SARS-CoV-2 S proteins inserted in the VSV genomic clone to produce Constructs 1-8 of FIG. 1. In Construct 1 SEQ ID NO: 1, the sequences of Leader Sequence 1 SEQ ID NO: 189, MPER SEQ ID NO: 163, TM SEQ ID NO: 164, and CT SEQ ID NO: 165 span from amino acid position nos. 1187-1273 of SEQ ID NO: 1. In Construct 2 SEQ ID NO: 4, the sequences of Leader Sequence 1 SEQ ID NO: 189, MPER SEQ ID NO: 163, TM SEQ ID NO: 164, and CT SEQ ID NO: 171 span from amino acid position nos. 1187-1242 of SEQ ID NO: 4. In Construct 3 SEQ ID NO: 7, the sequences of Leader Sequence 1 SEQ ID NO: 189, MPER SEQ ID NO: 163, TM SEQ ID NO: 164, and SEQ ID NO: 173 span from amino acid position nos. 1187-1263 of SEQ ID NO: 7. In Construct 4 SEQ ID NO: 10, the sequences of Leader Sequence 1 SEQ ID NO: 189, MPER SEQ ID NO: 163, SEQ ID NO: 175, and SEQ ID NO: 173 span from amino acid position nos. 1187-1266 of SEQ ID NO: 10. In Construct 5 SEQ ID NO: 13, the sequences of Leader Sequence 1 SEQ ID NO: 189, MPER SEQ ID NO: 177, SEQ ID NO: 175, and SEQ ID NO: 173 span from amino acid position nos. 1187-1260 of SEQ ID NO: 13. In Construct 6 SEQ ID NO: 16, the sequences of Leader Sequence 1 SEQ ID NO: 189, MPER SEQ ID NO: 163, TM SEQ ID NO: 164, and CT SEQ ID NO: 179 span from amino acid position nos. 1187-1252 of SEQ ID NO: 16. In Construct 7 SEQ ID NO: 19, the sequences of Leader Sequence 1 SEQ ID NO: 189, MPER SEQ ID NO: 177, TM SEQ ID NO: 181, CT SEQ ID NO: 182, and SEQ ID NO: 173 span from amino acid position nos. 1187-1283 of SEQ ID NO: 19. In Construct 8 SEQ ID NO: 22, the sequences of Leader Sequence 1 SEQ ID NO: 189, MPER SEQ ID NO: 177, TM SEQ ID NO: 181, CT SEQ ID NO: 182, and SEQ ID NO: 185 span from amino acid position nos. 1187-1275 of SEQ ID NO: 22. A segment of VSV-G with the sequence set forth in SEQ ID NO: 191 is also shown. In this VSV-G segment, the sequences of Leader Sequence 1, SEQ ID NO: 175, and SEQ ID NO: 173 span from amino acid position nos. 1-74 of SEQ ID NO: 191. Also in this VSV-G segment, the sequence of SEQ ID NO: 185 spans from amino acid position nos. 54-74 of SEQ ID NO: 191. SS, signal sequence; MPER, membrane-proximal external region; TM, transmembrane region; CT, cytoplasmic tail. Sequences in bold indicate inserted sequences that originate from VSV-G. S1 and S2 domains are shown, as well as the Furin cleavage site. Leader Sequence 1 is SEQ ID NO: 189. Leader Sequence 2 is SEQ ID NO: 190.

[0167] FIG. 6 illustrates recombinant VSVΔG-SARS-CoV-2 rescue from plasmid DNA. To initiate recovery of infectious virus from plasmid DNA, a blend of seven plasmids (contained in the box at the top of the figure) is electroporated into Vero cells that have been qualified for vaccine production. Witko et al., An efficient helper-virus free method for rescue of recombinant paramyxoviruses and rhadoviruses from a cell line suitable for vaccine development, J. Virol. Methods (2006); doi:10.1016/j.jviromet.2006.02.006. One of the plasmids is the VSVΔG-SARS-CoV-2 genomic clone that can be transcribed by the phage T7 RNA polymerase to generate viral RNA genomes. The remaining 6 supporting plasmids are controlled by the human cytomegalovirus (hCMV) promoter that is recognized by cellular RNA polymerase II in the nucleus. These supporting plasmids are designed to express proteins needed to initiate the virus life cycle, including the T7 bacteriophage RNA polymerase and the five VSV structural proteins (VSV-N, nucleocapsid protein; VSV-P, phosphoprotein; VSV-M, matrix protein; VSV-G, glycoprotein; and VSV-L, or large protein, which is the catalytic subunit of the viral RNA-dependent RNA polymerase; Dietzgen et al., The family Rhabdoviridae: mono- and bipartite negative-sense RNA viruses with diverse genome organization and common evolutionary origins, Virus Res. (2017); doi:10.1016/j.viruses.2016.10.010). Following electroporation, the cells are cultured for approximately 72 hours during which time the plasmids are transcribed, viral proteins are synthesized and viral genomes are encapsidated with VSV-N to form a nucleocapsid. The nucleocapsid can then be transcribed and replicated by the viral RNA polymerase allowing initiation of virus replication and assembly and release of infectious progeny virions that can be used later to infect fresh cultures of cells.

[0168] FIG. 7 shows virus infectivity titers of Construct 1 (rescued using a plasmid encoding wild-type SARS-CoV-2 S protein) improved over passages. Construct 1 (wild-type SARS-CoV-2 S protein) is adapted to the Vero cell culture by serial passages. Titers improved from 4.00E+05 pfu/mL to 2.00E+07 pfu/mL.

[0169] FIGS. 8A-B show Vero cells infected by Construct 1 (wild-type SARS-CoV-2 S protein with adaptive mutations evolving over multiple passages): passage 4 (P4) 52 hours post infection (FIG. 8A) and passage 12 (P12) 24 hours post infection (FIG. 8B). After serial passage, Construct 1 (wild-type SARS-CoV-2 S protein) was adapted to the Vero cell culture. At P12, more lytic cytopathic effect replaced the earlier syncytia at P4. The infection progressed more rapidly at the higher passages.

[0170] FIG. 9 shows SARS-CoV 2 S protein detected in the infected Vero cell lysate by Western blot. Vero cells were infected by clone isolates A*1 to A*12. Clone isolates with reduction of cleaved S protein had mutations at the Furin cleavage site, for example, R682K, R685G, S813R or S813F. Full length SARS-CoV-2 S protein (S) and S2 subunit (S2) are shown.

[0171] FIGS. 10A-C shows SARS-CoV S protein detected in the infected Vero cell lysate by Western blot. Monomeric (S) and dimeric (dimer) full-length SARS-CoV-2 S protein, as well as the S1 (S1) and S2 (S2) subunits are indicated. Vero cells were infected with clone isolates. In FIG. 10A, clone isolates SF1 and SF2 showed reduction of S protein post-translational processing, indicative of a mutations, e.g., R683G, at the Furin cleavage site. FIGS. 10A-B show western blots for isolates cloned in serum-free medium. In FIG. 10B, the arrow marks the control lanes. FIG. 10C shows a western blot for isolates cloned in serum-containing medium.

[0172] FIG. 11 shows titers of is rVSVΔG-SARS-CoV-2 clones SC1, SC3, SC7, and MB2 that were amplified in serum-free medium (VP-SFM). Titers of each clone were measured at indicating time points.

[0173] FIG. 12 shows titers of two vaccine candidates, rVSVΔG-SARS-CoV-2 clones MB1 and MB2, in the cell culture medium after infection. These two vaccine candidates have been further tested in non-human primates (NHP) and small animal models. See Example 15 below. rVSVΔG-SARS-CoV-2 clone MB1 reached to higher titers than rVSVΔG-SARS-CoV-2 clone MB2 at all selected time points. For virus production purpose, the harvest time should occur from 54 to 65 hours post infection rVSVΔG-SARS-CoV-2 clone MB1 and 72 h post infection for rVSVΔG-SARS-CoV-2 clone MB2.

[0174] FIGS. 13A-B shows cytopathic effect on Vero cells at the time of harvest of rVSVΔG-SARS-CoV-2 clone MB1(FIG. 13A) and rVSVΔG-SARS-CoV-2 clone MB2 (FIG. 13B).

[0175] FIGS. 14A-B shows Vero cells infected by Construct 6. FIG. 14A shows passage 4 (P4) at 43 hours post infection. FIG. 14B shows passage 11 (P11) at 48 hours post infection. Infectious titer was improved when the virus was adapted to the Vero cell culture by serial passages. The titers were 6.50E+05 pfu/mL at P4 and 2.70E+07 pfu/mL at P11, respectively. Mutations at E484D, H655Y in SARS-CoV-2 S protein, E213K in VSV-M and V411M in VSV-L were identified in the higher passage P11.

[0176] FIG. 15 shows the domains, mutations, and cleavage sites of SARS-CoV-2 S protein. MB1 and MB2 variants of the rVSVΔG-SARS-CoV-2 S protein are also shown.

[0177] FIG. 16 shows post-vaccination anti-SARS-CoV-2 spike protein-specific immunoglobulin (IgG) enzyme-linked immunosorbent assay (ELISA) titers through day 26 from Study HAM-CoV-2-001 Part A. The immunogenicity of rVSVΔG-SARS-CoV-2 clone MB1 and its ability to protect against SARS-CoV-2 challenge was studied in Golden Syrian hamster model of SARS-CoV-2 infection. Hamsters were administered rVSVΔG-SARS-CoV-2 clone MB1 via intramuscular (IM) or oral mucosal (OM) routes, or received a vaccine consisting of the SARS-CoV-2 S protein adjuvanted with aluminum phosphate (AdjuPhos) as described in Tables 10 and 11. We evaluated the ability of rVSVΔG-SARS-CoV-2 clone MB1 to protect against SARS-CoV-2-induced body weight loss. Serum samples were collected on Days 7, 17, and 26 post-immunization, and on Day 14 post-challenge. Serum samples were analyzed for SARS-CoV-2-S protein-specific IgG titers on Days 7, 14, and 26 in an ELISA. rVSVΔG-SARS-CoV-2 clone MB1 did not demonstrate anti-S protein-specific IgG titers after OM administration at Day 7, 14, or 26 post-vaccination, with titers similar to non-vaccinated animals.

[0178] FIGS. 17A-B show post-vaccination SARS-CoV-2 pseudoneutralization titers (PRNT) assay from Study HAM-CoV-2-001 Part A. The immunogenicity of rVSVΔG-SARS-CoV-2 clone MB1 and its ability to protect against SARS-CoV-2 challenge was studied in Golden Syrian hamster model of SARS-CoV-2 infection. Hamsters were administered rVSVΔG-SARS-CoV-2 clone MB1 via intramuscular (IM) or oral mucosal (OM) routes, or received a vaccine consisting of the SARS-CoV-2 S protein adjuvanted with aluminum phosphate (AdjuPhos) as described in Tables 10 and 11. In FIG. 17A, serum samples were collected on Days 7, 17, and 26 post-immunization and analyzed for SARS-CoV-2-specific PRNT titers. rVSVΔG-SARS-CoV-2 clone MB1 initiated immunogenicity after IM administration similarly to vaccination with S protein as shown by Day 7 and Day 26 post-vaccination SARS-CoV-2 neutralization assay titers. rVSVΔG-SARS-CoV-2 clone MB1 did not demonstrate SARS-CoV-2 neutralizing titers after OM administration at Day 7 or Day 26 post-vaccination. These titers were similar to titers in unvaccinated animals, with the exception of one animal with a high titer on Day 26. The dotted line indicates the limit of detection. FIG. 17B shows day 14 PRNT neutralizing titers from assay conducted with SARS-CoV-2. Serum samples were collected on Day 14 post-immunization and analyzed for SARS-CoV-2-specific PRNT titers. rVSVΔG-SARS-CoV-2 clone MB1 initiated immunogenicity after IM administration similarly to vaccination with S protein as shown by Day 14 post-vaccination SARS-CoV-2 neutralization assay titers, as determined by BIOQUAL. rVSVΔG-SARS-CoV-2 clone MB1 did not demonstrate SARS-CoV-2 neutralizing titers after OM administration at Day 14 post-vaccination, with titers similar to non-vaccinated animals. The dotted line indicates the limit of detection.

[0179] FIG. 18 shows post-vaccination SARS-CoV-2 titers (a PRNT assay) on days 7 and 14 from Study HAM-CoV-2-001 Part A.

[0180] FIGS. 19A-C show that rVSVΔG-SARS-CoV-2 clones MB1 and MB2 protect against COVID-19 body weight loss in the Golden Syrian hamster model of SARS-CoV-2 infection (Study Part A). The immunogenicity of rVSVΔG-SARS-CoV-2 clones MB1 and MB2 and its ability to protect against SARS-CoV-2 challenge was studied in Golden Syrian hamster model of SARS-CoV-2 infection. Hamsters were administered rVSVΔG-SARS-CoV-2 clone MB1 or MB2 via intramuscular (IM) or oral mucosal (OM) routes, or received a vaccine consisting of the SARS-CoV-2 S protein adjuvanted with aluminum phosphate (Spike Protein/AdjuPhos) as described in Tables 10 and 11. We evaluated the ability of rVSVΔG-SARS-CoV-2 clones MB1 and MB2 to protect against SARS-CoV-2-induced body weight loss. FIG. 19A shows body weight change over the course of 14 days due to MB1 administration via IM or OM administration. FIGS. 19B-C show body weight change over the course of 5 days and 14 days, respectively, due to rVSVΔG-SARS-CoV-2 clone MB1 or 2 MB2 via IM or OM administration. Both rVSVΔG-SARS-CoV-2 clones MB1 and MB2 protected animals against SARS-CoV-2-induced body weight loss after IM administration similarly to protection by vaccination with adjuvanted SARS-CoV-2 S protein (Spike Protein/AdjuPhos) in the Golden Syrian hamster model. Both rVSVΔG-SARS-CoV-2 clones MB1 and MB2 did not protect animals from SARS-CoV-2-induced body weight loss, similarly to unvaccinated animals.

[0181] FIG. 20 shows a sequence alignment comparing the nucleotide sequence of the S gene in rVSVΔG-SARS-CoV-2 clone MB1 (SEQ ID NO: 150; the subject sequence (shown as “sbjct”) in the alignment) with the codon-optimized, wild-type S gene in VSVΔG-SARS-CoV-2 (SEQ ID NO: 159; the query sequence (shown as “query) in the alignment).

[0182] FIGS. 21A-G show amino acid and nucleotide sequences for VSVΔG-SARS-CoV-2 clone MB2. FIG. 21A shows the order of genes in the genome of VSVΔG-SARS-CoV-2 clone MB2 from 5′ to 3′: VSV-N, VSV-P, VSV-M, codon-optimized SARS-CoV-2 S gene with H655Y and G1251* mutations, and VSV-L. Also shown are the XhoI and NheI sites. FIG. 21B shows the amino acid sequence for VSV-N(SEQ ID NO: 155). FIG. 21C shows the amino acid sequence for VSV-P (SEQ ID NO: 156). FIG. 21D shows the amino acid sequence for VSV-M (SEQ ID NO: 157). FIG. 21E shows the amino acid sequence for SARS-CoV-2 S protein with H665Y and G1251* mutations (SEQ ID NO: 158). The mutations are underlined. FIG. 21F shows the amino acid sequence for VSV-L with an I1343I silent mutation (SEQ ID NO: 152). The mutation is underlined. FIG. 21G shows the nucleotide sequence for the genome of VSVΔG-SARS-CoV-2 clone MB2, which has the nucleic acid sequence set forth in SEQ ID NO: 154. VSVΔG-SARS-CoV-2 clone MB2 encodes the proteins represented by the amino acid sequences in FIGS. 21B-F. The coding regions for VSV-N (nucleotides 64-1332), VSV-P (nucleotides 1396-2193), VSV-M (nucleotides 2250-2939), SARS-CoV-2 S protein (nucleotides 3102-6854; nucleotides that code for the H665Y and G1251* mutations are shown with black highlights and white text), and VSV-L (nucleotides 7011-13341; nucleotides that code for the I1343I silent mutation are shown with black highlights and white text) are underlined.

[0183] FIGS. 22A-F show amino acid and nucleotide sequences for Vector A, which is a VSV vector without the VSV-G gene. FIG. 22A shows the order of genes in Vector A from 5′ to 3′: VSV-N, VSV-P, VSV-M, and VSV-L. Also shown are the XhoI and NheI sites. FIG. 22B shows the amino acid sequence for Vector A VSV-N(SEQ ID NO: 155). FIG. 22C shows the amino acid sequence for Vector A VSV-P (SEQ ID NO: 156). FIG. 22D shows the amino acid sequence for Vector A VSV-M (SEQ ID NO: 157). FIG. 22E shows the amino acid sequence for Vector A VSV-L (SEQ ID NO: 152). FIG. 22F shows the nucleotide sequence for the genome of Vector A (without VSV-G gene) (SEQ ID NO: 160). The coding regions for VSV-N (nucleotides 64-1332), VSV-P (nucleotides 1396-2193), VSV-M (nucleotides 2250-2939), and VSV-L (nucleotides 3178-9507) are underlined. Vector A encodes the proteins represented by the amino acid sequences in FIGS. 22B-E.

[0184] FIGS. 23A-F show amino acid and nucleotide sequences for Vector B, which is a VSV vector without the VSV-G gene. FIG. 23A shows the order of genes in Vector B from 5′ to 3′: VSV-N, VSV-P, VSV-M, and VSV-L. Also shown are the BstBI and PacI sites. FIG. 23B shows the amino acid sequence for Vector B VSV-N(SEQ ID NO: 155). FIG. 23C shows the amino acid sequence for Vector B VSV-P (SEQ ID NO: 156). FIG. 23D shows the amino acid sequence for Vector B VSV-M (SEQ ID NO: 157). FIG. 23E shows the amino acid sequence for Vector B VSV-L (SEQ ID NO: 152). FIG. 23F shows the nucleotide sequence for the genome of Vector B (without VSV-G gene) (SEQ ID NO: 161). The coding regions for VSV-N (nucleotides 64-1332), VSV-P (nucleotides 1396-2193), VSV-M (nucleotides 2253-2942), and VSV-L (nucleotides 3062-9391) are underlined. Vector B encodes the proteins represented by the amino acid sequences in FIGS. 23B-E.

[0185] FIGS. 24A-G show amino acid and nucleotide sequences for VSVΔG-SARS-CoV-2 clone MB1. FIG. 24A shows the order of genes in VSVΔG-SARS-CoV-2 clone MB1 from 5′ to 3′: VSV-N (nucleotides 64 to 1332), VSV-P (nucleotides 1396 to 2193), VSV-M (nucleotides 2250 to 2939), codon-optimized SARS-CoV-2 S protein-optimized gene (nucleotides 3102 to 6854), and VSV-L (nucleotides 7012 to 13341). FIG. 24B shows the amino acid sequence for VSV-N(SEQ ID NO: 155). FIG. 24C shows the amino acid sequence for VSV-P (SEQ ID NO: 156). FIG. 24D shows the amino acid sequence for VSV-M (SEQ ID NO: 151) which comprises an amino acid Y61S mutation. FIG. 24E shows the amino acid sequence of SARS-CoV-2 S protein (SEQ ID NO: 153) which comprises R683G, S813F, and G1251* mutations. The G1251* mutation results in early termination of the SARS-CoV-2 S protein with the deletion of the last 23 amino acids. FIG. 24F shows the amino acid sequence for VSV-L (SEQ ID NO: 152). FIG. 24G shows the nucleotide sequence for VSVΔG-SARS-CoV-2 clone MB1 (SEQ ID NO: 150). VSVΔG-SARS-CoV-2 clone MB1 encodes the proteins represented by the amino acid sequences in FIGS. 24B-F (SEQ ID NOS: 155, 156, 151, 153, and 152, respectively). The following nucleotide and amino changes were observed relative to the wild-type sequence and are shown with black highlights and white text: (a) VSV-M—nucleotide A2431C; amino acid Y61S; (b) non-coding sequence—nucleotide C3058T; (c) SARS-CoV-2 S protein-nucleotide A5148G; amino acid R683G; (d) SARS-CoV-2 S protein—nucleotide C5539T; amino acid S813F; (e) SARS-CoV-2 S protein—nucleotide G6852T; amino acid G1251* (which results in early termination of the SARS-CoV-2 S protein with the deletion of the last 23 amino acids).

[0186] FIG. 25 shows NT50 (inverse of the dilution of the serum at which 50% of input virus is prevented from infecting cells) and VC average plaque counts for PRNT assays of clone isolates. VC=virus control.

[0187] FIGS. 26A-B show flow virometry data for HeLa cells expressing ACE2 (hAVE2 cells) that were infected with recombinant virus of clone isolates. FIG. 26A shows data for clones isolated in serum-containing medium. FIG. 26B shows data for clones isolated in serum-free medium. Anti-VSV-N antibody staining is shown in the y-axis. Anti-SARS-CoV-2 S protein neutralizing antibody staining (nAB) is shown in the x-axis.

[0188] FIG. 27 shows binding of recombinant virus of clones SC1, SC3, SC7, and MB2 to anti-hACE2 Ig antibody. Anti-VSV-N antibody staining is shown in the y-axis. Anti-huACE2 Ig antibody staining is shown in the x-axis.

[0189] FIG. 28 shows PRNT neutralizing titers at Days 14 and 28 after vaccination.

[0190] FIGS. 29A-D show viral loads as determined by TCID₅₀ in the lung and the nose at Day 4 after challenge. FIG. 29A shows IM titration lung titers. FIG. 29B shows IM titration nose titers. FIG. 29C shows oral dosing lung titers. FIG. 29D shows oral dosing nose titers. IM, intramuscular; OM, oral mucosal; OMx2, two oral mucosal doses; PO, oral; IN+OM, intranasal+oral mucosal.

[0191] FIG. 30 shows the SARS-CoV-2 S protein IgG levels in the serum of rhesus macaques vaccinated with VSVΔG-SARS-CoV-2 strain Fp11. IN, intranasal; OM, oral mucosal; IN+OM, intranasal+oral mucosal.

### DETAILED DESCRIPTION

[0192] The present disclosure relates to vaccine compositions and uses thereof for preventing COVID-19 caused by the pandemic coronavirus Severe Acute Respiratory Syndrome coronavirus 2 (SARS-CoV-2). The present disclosure describes vaccine compositions for delivering a SARS-CoV-2 spike (S) protein or its immunogenic variant using replication-competent vesicular stomatitis virus (VSV) chimeric virus technology (VSVΔG). This technology allows immunization with the SARS-CoV-2 S protein or its immunogenic variant presented on the surface of infected cells and recombinant VSV particles in the context of immune stimulation by a viral infection. Different VSVΔG chimeras expressing the SARS-CoV-2 S protein or its immunogenic variant may be generated using different recombinant VSV backbones, for example, the one used to generate the FDA and EMA-licensed Merck Zaire Ebola virus (ZEBOV) vaccine (ERVEBO®). VSV (Indiana serotype) genetic backgrounds can be used but also other vesiculoviruses can be considered for use such as VSV (New Jersey serotype) or related vesiculoviruses such as Maraba virus, Carajas virus, Alagoas virus, Cocal virus, or Isfahan virus. Additionally, genetically modified variants of VSV (Indiana serotype) or the other vesculovirsues can be used. Moreover, the present disclosure describes adaptive mutants of the recombinant replicable VSV particle having better growth in a cell culture. These mutants have one or more mutations in, for example, the exposed loop (a solvent-exposed loop that comprises the S1/S2 cleavage site), S1/S2 cleavage site, S2′ (previously referenced as S″) cleavage site and/or cytoplasmic tail of the SARS-CoV-2 S protein. The vaccine compositions may be administered to subjects in one or two doses to induce protective immunity within days, for example, as little as 10 days. Vaccination up to 1-3 days after exposure to SARS-CoV-2 may be effective for preventing COVID-19. Upon vaccination of subjects, virus-neutralizing antibodies (nAbs) against the SARS-CoV-2 S protein may be induced in the subjects and harvested to make a pharmaceutical composition for preventing or treating COVID-19.

[0193] VSV typically grows very rapidly and robustly in cell culture. Generation of a chimeric virus by replacing VSV glycoprotein (VSV-G) with a heterologous glycoprotein like the SARS-CoV-2 S protein can substantially diminish the replicative capacity of the recombinant virus. In addition to using rational design of SARS-CoV-2 S protein variants to achieve VSVΔG-SARS-CoV-2 chimera for replication needed to support vaccine manufacturing as well as effective immunization (FIG. 4), the present disclosure describes that the evolutionary potential of VSV can also be used to identify novel SARS-CoV-2 S protein modifications that enhance virus growth.

[0194] Viruses like VSV with RNA genomes are known to have the capacity to mutate and evolve when faced with new circumstances that are not optimal virus growth (Novella IS. 2003. Contributions of vesicular stomatitis virus to the understanding of RNA virus evolution. Curr Opin Microbiol 6:399-405). These circumstances can be environmental factors like changes in temperature or alternative host cells, or they can be caused by deleterious modifications to the virus, such as replacement of the VSV-G with the glycoprotein from a heterologous virus. As VSV replicates under conditions in which replication is impaired, it will evolve mutations that contribute to restoration of its replicative capacity. Thus, this ability of VSV to generate favorable adaptive mutations can be used to identify amino acid substitutions or other types of modifications in the SARS-CoV-2 spike that enable improved replication of a VSVΔG-SARS-CoV-2 chimera. In the laboratory, evolution of favorable mutations can be accomplished by serial passage of the virus in cultured cells while monitoring for emergence of mutant strains that grows more robustly. Adaptive mutations responsible for improved growth can then be identified by determining the nucleotide sequence of the new virus strain.

### I. Definitions

[0195] The term “antibody” includes intact molecules as well as any fragments thereof that are capable of specifically binding the epitope of the antibody, such as, but not limited to, Fab, F(ab′)₂, Fv and scFv which are capable of binding the epitope determinant. These antibody fragments retain some ability to selectively bind with its antigen or receptor and include, for example: (i) Fab, the fragment which contains a monovalent antigen-binding fragment of an antibody molecule can be produced by digestion of whole antibody with the enzyme papain to yield an intact light chain and a portion of one heavy chain; (ii) Fab′, the fragment of an antibody molecule can be obtained by treating whole antibody with pepsin, followed by reduction, to yield an intact light chain and a portion of the 20 heavy chain; two Fab′ fragments are obtained per antibody molecule; (iii) F(ab′)₂, the fragment of the antibody that can be obtained by treating whole antibody with the enzyme pepsin without subsequent reduction; F(ab′)₂ is a dimer of two Fab′ fragments held together by two disulfide bonds; (iv) scFv, including a genetically engineered fragment containing the variable region of a heavy and a light chain as a fused single chain molecule.

[0196] As used herein, the terms “antigen” or “immunogen” are used interchangeably to refer to a substance, typically a protein, which is capable of inducing an immune response in a subject. The term also refers to proteins that are immunologically active in the sense that once administered to a subject (either directly or by administering to the subject a nucleotide sequence or vector that encodes the protein) is able to evoke an immune response of the humoral and/or cellular type directed against that protein.

[0197] The term “derived from” used herein refers to an origin or source, and may include naturally occurring, recombinant, unpurified or purified molecules. The molecules of the present disclosure may be derived from viral or non-viral molecules. A protein or polypeptide derived from an original protein or polypeptide may comprise the original protein or polypeptide, in part or in whole, and may be a fragment or variant of the original protein or polypeptide. A nucleic acid molecule or polynucleotide derived from an original nucleic acid molecule or polynucleotide may comprise the original nucleic acid molecule or polynucleotide, in part or in whole, and may be a fragment or variant of the original nucleic acid molecule or polynucleotide.

[0198] The term “foreign gene” used herein refers to a gene of an origin or source different from that of a vector, into which the foreign gene is inserted. For example, the vector may be derived from a vesicular stomatitis virus (VSV) while the foreign gene may be derived from a Severe Acute Respiratory Syndrome coronavirus 2 (SARS-CoV-2).

[0199] The term “fragment” of a protein as used herein refers to a polypeptide having an amino acid sequence that is the same as a part, but not all, of the amino acid sequence of the protein. A fragment may be a functional fragment of a protein that retains the same function as the protein.

[0200] The terms “nucleic acid molecule” and “polynucleotide” are used interchangeably herein to refer to a polymer of nucleic acids of any length and having a “nucleic acid sequence” or “nucleotide sequence.” As used herein the terms “nucleotide sequence” and “nucleic acid sequence” refer to a deoxyribonucleic acid (DNA) sequence, a ribonucleic acid (RNA) sequence or a combination thereof, including, without limitation, messenger RNA (mRNA), DNA/RNA hybrids, or synthetic nucleic acids. The “nucleic acid molecule” and “polynucleotide” can be single-stranded, or partially or completely double-stranded (duplex), which can be homoduplex or heteroduplex.

[0201] For the proteins of the present disclosure to be expressed, the protein coding sequence should be “operably linked” to regulatory or nucleic acid control sequences that direct transcription and translation of the protein. As used herein, a coding sequence and a nucleic acid control sequence or promoter are said to be “operably linked” when they are covalently linked in such a way as to place the expression or transcription and/or translation of the coding sequence under the influence or control of the nucleic acid control sequence. The “nucleic acid control sequence” can be any nucleic acid element, such as, but not limited to promoters, enhancers, IRES, introns, and other elements described herein that direct the expression of a nucleic acid sequence or coding sequence that is operably linked thereto. The expression of the transgenes of the present disclosure can be under the control of a constitutive promoter or of an inducible promoter, which initiates transcription when exposed to some particular external stimulus, such as, without limitation, antibiotics such as tetracycline, hormones such as ecdysone, or heavy metals. The promoter can also be specific to a particular cell-type, tissue or organ. Many suitable promoters and enhancers are known in the art, and any such suitable promoter or enhancer may be used for expression of the transgenes of the disclosure. For example, suitable promoters and/or enhancers can be selected from the Eukaryotic Promoter Database (EPDB).

[0202] The term “percent homology” refers to the amount of sequence identity between two sequences. If a variant is a fragment of the wild-type SARS-CoV-2 S protein, % homology is measured over the length of the fragment instead of the length of the wild-type SARS-CoV-2 S protein. In some embodiments, the full-length variant or fragment variant comprises at least 90%, 91%, 92%, 93%, 94%, 95%, 96%, 97%, 98%, or 99% homology with the wild-type SARS-CoV-2 S protein. In some embodiments, the full-length variant or fragment variant comprises 100% homology with the wild-type SARS-CoV-2 S protein (SEQ ID NO: 1).

[0203] The terms “protein”, “peptide”, “polypeptide”, and “amino acid sequence” are used interchangeably herein to refer to polymers of amino acid residues of any length. The polymer may be linear or branched, it may comprise modified amino acids or amino acid analogs, and it may be interrupted by chemical moieties other than amino acids. The terms also encompass an amino acid polymer that has been modified naturally or by intervention; for example, disulfide bond formation, glycosylation, lipidation, acetylation, phosphorylation, or any other manipulation or modification, such as conjugation with a labeling or bioactive component.

[0204] As used herein the term “transgene” may be used to refer to “recombinant” nucleotide sequences that may be derived from any of the nucleotide sequences encoding the proteins of the present disclosure. The term “recombinant” means a nucleotide sequence that has been manipulated “by man” and which does not occur in nature, or is linked to another nucleotide sequence or found in a different arrangement in nature. It is understood that manipulated “by man” means manipulated by some artificial means, including by use of machines, codon optimization, restriction enzymes, etc.

[0205] For example, in one embodiment the nucleotide sequences may be mutated such that the activity of the encoded proteins in vivo is abrogated.

[0206] As regards codon optimization, the nucleic acid molecules of the disclosure have a nucleotide sequence that encodes the antigens of the disclosure and can be designed to employ codons that are used in the genes of the subject in which the antigen is to be produced. Many viruses, including coronaviruses, use a large number of rare codons and, by altering these codons to correspond to codons commonly used in the desired subject, enhanced expression of the antigens can be achieved. In some embodiments, the codons used are “humanized” codons, i.e., the codons are those that appear frequently in highly expressed human genes (Andre et al., J. Virol. 72:1497-1503, 1998) instead of those codons that are frequently used by a coronavirus. Such codon usage provides for efficient expression of the transgenic coronavirus proteins in human cells. Any suitable method of codon optimization may be used. Such methods, and the selection of such methods, are well known to those of skill in the art. In addition, there are several companies that will optimize codons of sequences, such as Geneart (geneart.com). Thus, the nucleotide sequences of the disclosure can readily be codon optimized.

[0207] The disclosure further provides nucleotide sequences encoding functionally and/or antigenically equivalent variants and derivatives of the antigens of the disclosure and functionally equivalent fragments thereof, for example, the SARS-CoV-2 S protein or an immunogenic variant thereof. These functionally equivalent variants, derivatives, and fragments display the ability to retain antigenic activity. For instance, changes in a DNA sequence that do not change the encoded amino acid sequence, as well as those that result in conservative substitutions of amino acid residues, one or more than one amino acid deletions or additions, and substitution of amino acid residues by amino acid analogs are those which will not significantly affect properties of the encoded polypeptide. In one embodiment, the variants have at least 50%, at least 55%, at least 60%, at least 65%, at least 70%, at least 75%, at least 80%, at least 85%, at least 86%, at least 87%, at least 88%, at least 89%, at least 90%, at least 91%, at least 92%, at least 93%, at least 94%, at least 95%, at least 96%, at least 97%, at least 98% or at least 99% homology or identity to the antigen, epitope, immunogen, peptide or polypeptide of interest.

[0208] For the purposes of the present disclosure, sequence identity or homology is determined by comparing the sequences when aligned so as to maximize overlap and identity while minimizing sequence gaps. In particular, sequence identity may be determined using any of a number of mathematical algorithms. A nonlimiting example of a mathematical algorithm used for comparison of two sequences is the algorithm of Karlin & Altschul, Proc. Natl. Acad. Sci. USA 1990; 87: 2264-2268, modified as in Karlin & Altschul, Proc. Natl. Acad. Sci. USA 1993; 90: 5873-5877.

[0209] Another example of a mathematical algorithm used for comparison of sequences is the algorithm of Myers & Miller, CABIOS 1988; 4: 11-17. Such an algorithm is incorporated into the ALIGN program (version 2.0) which is part of the GCG sequence alignment software package. When utilizing the ALIGN program for comparing amino acid sequences, a PAM120 weight residue table, a gap length penalty of 12, and a gap penalty of 4 can be used. Yet another useful algorithm for identifying regions of local sequence similarity and alignment is the FASTA algorithm as described in Pearson & Lipman, Proc. Natl. Acad. Sci. USA 1988; 85: 2444-2448.

[0210] Advantageous for use according to the present disclosure is the WU-BLAST (Washington University BLAST) version 2.0 software. WU-BLAST version 2.0 executable programs for several UNIX platforms can be downloaded. This program is based on WU-BLAST version 1.4, which in turn is based on the public domain NCBI-BLAST version 1.4 (Altschul & Gish, 1996, Local alignment statistics, Doolittle ed., Methods in Enzymology 266: 460-480; Altschul et al., Journal of Molecular Biology 1990; 215: 403-410; Gish & States, 1993; Nature Genetics 3: 266-272; Karlin & Altschul, 1993; Proc. Natl. Acad. Sci. USA 90: 5873-5877; all of which are incorporated by reference herein).

[0211] The various recombinant nucleotide sequences and proteins of the disclosure are made using standard recombinant DNA and cloning techniques. Such techniques are well known to those of skill in the art. See for example, “Molecular Cloning: A Laboratory Manual”, second edition (Sambrook et al. 1989).

[0212] The term “variant” of a protein refers to a polypeptide having an amino acid sequence that is the same as that of the protein except having at least one amino acid modified, for example, deleted, inserted, or replaced, so long as the variant functions like the protein (even if the amount or characteristics of the function differ from the protein). The amino acid replacement may be a conservative amino acid substitution. The amino acid replacement may be a non-essential amino acid residue in the protein. A “conservative amino acid substitution” is one in which the amino acid residue is replaced with an amino acid residue having a similar side chain. Families of amino acid residues having similar side chains are known in the art. For example, amino acids are generally divided into four families:
[0213] (1) acidic—aspartatic acid and glutamic acid;
[0214] (2) basic—lysine, arginine, histidine;
[0215] (3) non-polar—alanine, valine, leucine, isoleucine, proline, phenylalanine, methionine, tryptophan (with valine, isoleucine, and leucine seen as particularly related); and
[0216] (4) uncharged polar—glycine, asparagine, glutamine, cysteine, serine threonine, tyrosine (with asparagine and glutamine seen as particularly related).
   Conservative amino acid substitutions may be made within these families.

[0217] Phenylalanine, tryptophan, and tyrosine are sometimes classified as aromatic amino acids with hydrophobic side chains and may be substituted for each other. Glycine may also be substituted for alanine and vice versa. Serine, threonine, and methionine may also be substituted for each other.

[0218] For example, it is reasonably predictable that an isolated replacement of leucine with isoleucine or valine, or vice versa; an aspartate with a glutamate or vice versa; a threonine with a serine or vice versa; or a similar conservative replacement of an amino acid with a structurally related amino acid, will not have a major effect on the biological activity. Proteins having substantially the same amino acid sequence as the sequences illustrated and described but possessing minor amino acid substitutions that do not substantially affect the immunogenicity of the protein are, therefore, within the scope of the disclosure. Other immunogenic variants are also encompassed by this disclosure.

[0219] The terms “virus” and “viral particle” are used herein interchangeably and refer to a replicable virus having its genome enclosed by a protein coat. The term “replication capacity” used herein refers to how quickly a virus or viral particle reproduces (i.e., replicates). Where the virus or viral particle is recombinant and carries a foreign gene and/or foreign protein, the replication capacity of the virus or viral particle may be reduced.

### II. Vectors and Viral Particles

[0220] A recombinant VSV vector or recombinant VSV viral particle comprises at least a portion of the VSV genome comprising the N, P, M, and L genes and a nucleic acid sequence encoding the SARS-CoV-2 S protein or an immunogenic variant thereof. This allows generation of a recombinant VSV particle comprising this vector and displaying the S protein or an immunogenic variant thereof on the surface of the VSV particle, specifically the S protein or immunogenic variant thereof displayed on the surface of the VSV particle is the S protein encoded by the vector or by the nucleic acids of the recombinant VSV particle.

[0221] In certain embodiments the VSV particle is replicable.

[0222] In some embodiments the vectors or particles encode an immunogenic recombinant protein comprising a SARS-CoV-2 S protein or an immunogenic variant thereof. In some embodiments, the vectors or particles encode an immunogenic recombinant protein encoding both a SARS-CoV-2 S protein or an immunogenic variant thereof and at least a fragment of the VSV glycoprotein (G).

[0223] These vectors or particles, or the immunogenic proteins encoded by them, may be used as vaccines.

[0224] Any vector that allows expression of the proteins of the present disclosure, namely, the SARS-CoV-2 S protein or an immunogenic variant thereof, may be used in accordance with the present disclosure. The vectors may contain a suitable gene regulatory region, such as a promoter or enhancer, such that the proteins and viral particles of the present disclosure can be produced.

[0225] When the aim, for example, is to express the proteins of the disclosure in vitro, or in cultured cells, or in any prokaryotic or eukaryotic system for the purpose of producing the protein(s), then any suitable vector can be used depending on the application. For example, plasmids, viral vectors, bacterial vectors, protozoal vectors, insect vectors, baculovirus expression vectors, yeast vectors, mammalian cell vectors, and the like, can be used. Suitable vectors can be selected by the skilled artisan taking into consideration the characteristics of the vector and the requirements for expressing the proteins under the identified circumstances.

[0226] In certain embodiments, the antigens and/or antibodies of the present disclosure may be used in vitro (such as using cell-free expression systems) and/or in cultured cells grown in vitro in order to produce the encoded SARS-CoV-2-antigens and/or antibodies which may then be used for various applications such as in the production of proteinaceous vaccines. For such applications, any vector that allows expression of the antigens and/or antibodies in vitro and/or in cultured cells may be used.

[0227] When the aim is to express the proteins or viral particles of the disclosure in vivo in a subject, for example, in order to generate an immune response against a SARS-CoV-2 antigen and/or generate protective immunity against SARS-CoV-2, expression vectors that are suitable for expression on that subject, and that are safe for use in vivo, should be chosen. Methods on generating an immune response against SARS-CoV-2 are described in detail in Section VII below.

[0228] For applications where it is desired that the proteins be expressed in vivo, for example, when the transgenes of the disclosure are used in DNA or DNA-containing vaccines, any vector that allows for the expression of the proteins of the present disclosure and is safe for use in vivo may be used. In some embodiments the vectors used are safe for use in humans, mammals and/or laboratory animals.

[0229] In some embodiments it may be desirable to express and isolate the proteins or viral particles of the present disclosure, such as from animal subjects or cells (such as bacterial cells, yeast, insect cells, and mammalian cells) grown in culture, for preclinical testing of the immunogenic recombinant proteins or vaccines of the disclosure. Any suitable transfection, transformation, or gene delivery methods can be used and such methods are well known by those skilled in the art. Examples of methods known in the art can be chosen from transfection, transformation, microinjection, infection, electroporation, lipofection, and liposome-mediated delivery. The proteins and viral particles of the disclosure can also be expressed using methods known in the art, including in vitro transcription/translation systems.

[0230] In other embodiments, it may be desirable to express the proteins or viral particles of the disclosure in human subjects, such as in clinical trials and for actual clinical use of the immunogenic recombinant proteins or vaccine of the present disclosure. In some embodiments, vectors used for these in vivo applications are attenuated to vector from amplifying in the subject. For example, if plasmid vectors are used, they may lack an origin of replication that functions in the subject so as to enhance safety for in vivo use in the subject. If viral vectors are used, they may be attenuated or replication-defective in the subject, again, so as to enhance safety for in vivo use in the subject.

[0231] In some embodiments of the present disclosure, viral vectors are used. The present disclosure relates to recombinant vesicular stomatitis (VSV) vectors, however, other vectors may be contemplated in other embodiments of the disclosure such as, but not limited to, prime boost administration which may comprise administration of a recombinant VSV vector in combination with another recombinant vector expressing one or more SARS-CoV-2 epitopes. Viral expression vectors are well known to those skilled in the art and include, for example, viruses such as adenoviruses, adeno-associated viruses (AAV), alphaviruses, herpesviruses, retroviruses and poxviruses, including avipox viruses, attenuated poxviruses, vaccinia viruses, and particularly, the modified vaccinia Ankara virus (MVA; ATCC Accession No. VR-1566). Such viruses, when used as expression vectors are innately non-pathogenic in the selected subjects such as humans or have been modified to render them non-pathogenic in the selected subjects. For example, replication-defective adenoviruses and alphaviruses are well known and can be used as gene delivery vectors.

[0232] The nucleotide sequences of the present disclosure may be inserted into “vectors.” The term “vector” is widely used and understood by those of skill in the art, and as used herein the term “vector” is used consistent with its meaning to those of skill in the art. For example, the term “vector” is commonly used by those skilled in the art to refer to a vehicle that allows or facilitates the transfer of nucleic acid molecules from one environment to another or that allows or facilitates the manipulation of a nucleic acid molecule.

[0233] A. Recombinant VSV Vectors and Recombinant VSV Particles

[0234] In some embodiments, the vector is a recombinant vesicular stomatitis virus (VSV) vector. The term “VSV vector” refers to a vector of the Rhabdoviridae family of enveloped viruses that can be used to deliver genetic material to a host cell, and the VSV vector can be maintained by replication within the host cell. VSVs contain a single-stranded, nonsegmented, negative-sense RNA genome. Because the VSV naturally infects livestock and is known to infect humans producing mild illness or no symptoms of infection, the VSV has been modified to be a human vaccine vector for producing recombinant replicable VSV particles presenting foreign immunogenic antigens to induce protective immune response to a pathogen in a subject. VSV vectors are practical, safe, and immunogenic vectors that are used for conducting animal studies, and an attractive candidate for developing vaccines for use in humans.

[0235] A VSV vector may comprise any combination of the VSV genes N, P, M, G, and L (VSV-N, VSV-P, VSV-M, VSV-G, and VSV-L), wherein some or all of these genes may be present or absent, and each of these genes may be present or absent in part or in its entirety. The VSV genes are described in Section II.C below. Additional protein coding genes or open reading frames (ORFs) may be expressed from a VSV vector.

[0236] A recombinant VSV vector may comprise a VSV genome, which may provide a recombinant VSV particle. A recombinant VSV particle may also comprise a VSV genome. In some embodiments, the recombinant VSV vector and/or recombinant VSV particle is replicable.

[0237] 1. Modified VSV Genome

[0238] In many embodiments, the recombinant VSV vector or recombinant VSV particle may comprise a modified VSV genome wherein at least a portion of the VSV genome is present. In some embodiments, the recombinant VSV vector or recombinant VSV particle comprises the VSV-N, VSV-P, VSV-M, and VSV-L genes, or any combination thereof. The VSV-N, VSV-P, VSV-M, and VSV-L genes are described in Section II.C.1 below. In some embodiments, the VSV genome further comprises at least a fragment of the VSV-G gene. In other embodiments, the VSV genome may exclude the VSV-G gene in its entirety. The VSV-G is described in Section II.C.2 below.

[0239] 2. Modified VSV Genome and a Foreign Gene

[0240] In some embodiments, the modified VSV genome may further comprise a foreign gene, thereby giving rise to expression of a foreign epitope. In some embodiments, the foreign gene is derived from SARS-CoV-2 and the foreign epitope is a SARS-CoV-2 epitope, for example, a SARS-CoV-2 S protein or an immunogenic variant thereof. Therefore, a recombinant VSV vector or recombinant VSV particle may comprise a modified VSV genome and a nucleic acid sequence encoding the SARS-CoV-2 S protein or an immunogenic variant thereof. FIGS. 4 and 5 show exemplary nucleotide sequences encoding VSVΔG-SARS-CoV-2 S proteins inserted in a VSV genomic background, encoding the SARS-CoV-2 S protein or variant thereof. As such, in some embodiments, a recombinant VSV vector or recombinant VSV particle may comprise modified VSV genome and a nucleotide sequence encoding a SARS-CoV-2 S protein. The SARS-CoV-2 S protein and variants thereof are described in Section II.B below, while immunogenic proteins are described below in Section III below. Exemplary recombinant VSV vectors comprising modified VSV genome and a SARS-CoV-2 S protein variant are described in Section II.F below. In some embodiments, the recombinant VSV particle displays the SARS-CoV-2 S protein or variant thereof on its surface.

[0241] B. SARS-CoV-2 S Proteins

[0242] A recombinant VSV vector, recombinant VSV particle, immunogenic recombinant protein, or SARS-CoV-2 vaccine may comprise any epitope recognized by an anti-SARS-CoV-2 antibody. For example, the SARS-CoV-2 S protein of any coronavirus that causes COVID-19, including any coronavirus that may be isolated from a COVID-19 patient, may be used. In many embodiments, a recombinant VSV vector, recombinant VSV particle, immunogenic recombinant protein, or SARS-CoV-2 vaccine of the present disclosure may comprise a SARS-CoV-2 S protein or variant thereof.

[0243] The SARS-CoV-2 S protein binds to and enters the host cell by recognizing the receptor ACE2. (Li, W. et al., Nature, 426, 46965 (2003): 450-454.) The SARS-CoV-2 S protein has 1273 amino acids and contains S1 and S2 subunits (amino acids 14-685 and 686-1273, respectively). (Huang, Y. et al., Acta Pharmacologica Sinica, 41, 9 (2020):1141-1149.) The S1/S2 cleavage site lies (SPRRARSV, which are amino acids 680-687 in SEQ ID NO: 1, wherein cleavage occurs between R685 and S686) within a solvent-exposed loop Furin (Wrapp, D. et al., Science, 367, 6483 (2020):1260-1263; amino acids 673-691 in SEQ ID NO: 1) and is cleaved by proteases such as Furin that recognize basic amino acid sequences like 682-RRAR-685 found in the SARS-CoV-2 S precursor protein. Cleavage at S1/S2 enhances viral infectivity. (Tang et al., Coronavirus membrane fusion mechanism offers a potential target for antiviral development, Antiviral Res (2020), doi:10.1016/j.antiviral.2020.104792.) The S2′ cleavage site (previously referenced as S″; SKPSKRSF, which are amino acids 810-817 in SEQ ID NO: 1, wherein cleavage occurs between 815R and 816S) lies within a solvent-exposed loop (Wrapp, D. et al., Science, 367, 6483 (2020):1260-1263; amino acids 673-691 in SEQ ID NO: 1) and is joined to the N-terminus of the fusion peptide. Cleavage at the S2′ site at amino acid R815 by proteases like Cathepsin L or TMPRSS2 triggers fusion peptide activity that allows the S2 subunit to direct fusion between the viral and cellular membranes. Cleavage at the S2′ site is related to virus infection. (Tang et al., Coronavirus membrane fusion mechanism offers a potential target for antiviral development, Antiviral Res (2020), doi:10.1016/j.antiviral.2020.104792.)

[0244] All numbering of the SARS-CoV-2 S protein in the disclosure and claims is relative to SEQ ID NO: 1. This includes both position numbers and numbers of amino acids deleted from certain truncation mutations; all are relative to SEQ ID NO: 1. Unless otherwise specified by referring to a particular variant or by specifically referring to wildtype, all references in the disclosure and claims to SARS-CoV-2 S protein or S protein include both the wildtype and immunogenic variant forms of the S protein (including immunogenic variants that have substitution mutations, insertion mutations, deletion mutations (including fragments, which are shorter in length than wildtype), and/or modifications).

[0245] The SARS-CoV-2 S protein further comprises the following domains: signal peptide (amino acids 1-13 in Huang et al.; amino acids 1-15 in SEQ ID NO: 1), N-terminal domain (NTD; amino acids 14-305 in Huang et al.), receptor-binding domain (RBD; amino acids 319-541 in Huang et al.), fusion peptide (FP; amino acids 788-806 in Huang et al.), heptad repeat 1 (HR1; amino acids 912-984 in Huang et al.), heptad repeat 2 (HR2; amino acids 1163-1213 in Huang et al.), transmembrane domain (TMD; amino acids 1213-1237 in Huang et al.; amino acids 1218-1234 in SEQ ID NO: 1), and cytoplasmic tail (CT; amino acids 1237-1273 in Huang et al.; amino acids 1235-1273 in SEQ ID NO: 1) (Huang, Y. et al., Acta Pharmacologica Sinica, 41, 9 (2020):1141-1149). Within the HR2 domain, lies a membrane-proximal external region (MPER; amino acids 1205-1213 in Zhu et al.; amino acids 1206-1217 in SEQ ID NO: 1). (Zhu, W. et al., Journal of Virology, 94, 14 (2020):1-12.) Within the CT lies an endoplasmic reticulum retention sequence (ERRS; amino acids 1251-1255 in Ujike et al.). (Ujike, M. et al., Journal of General Virology, 97, 8 (2016):1853-1864.)

[0246] The SARS-CoV-2 virus binds to the host cell receptor ACE2 via the RBD in the S1 subunit. (Huang, Y. et al., Acta Pharmacologica Sinica, 41, 9 (2020):1141-1149.) This binding promotes the formation of endosomes, which initiates viral fusion activity under low pH. The S2 subunit, which comprises the FP, HR1, HR2, TMD and CT, is responsible for viral fusion and entry. (Huang, Y. et al., Acta Pharmacologica Sinica, 41, 9 (2020):1141-1149.) FP is a 15-20 stretch of mainly hydrophobic amino acids (such as glycine or alanine) and has been shown to disrupt and connect lipid bilayers of the host cell membrane. (Huang, Y. et al., Acta Pharmacologica Sinica, 41, 9 (2020):1141-1149.) HR1 and HR2 comprise repeats of a heptapeptide, and the two HR domains come together to form a six-helical bundle that fuses the host cell membrane with the viral membrane. (Huang, Y. et al., Acta Pharmacologica Sinica, 41, 9 (2020):1141-1149.) Following entry, viral RNA is released into the cytoplasm and their replication and transcription begin. (Song, Z. et al., Viruses, 11, 59 (2019):1-58.)

[0247] The SARS-CoV-2 virus assembles by packaging genomic RNA and nucleocapsid (N) protein from the cytoplasm, followed by budding into the lumen of the endoplasmic reticulum (ER)-Golgi intermediate compartment (ERGIC). (Song, Z. et al., Viruses, 11, 59 (2019):1-58.) The ERRS is thought to facilitate accumulation of SARS-CoV-2 S proteins at the SARS-CoV-2 budding site and SARS-CoV-2 S protein incorporation into viral particles. (Ujike, M. et al., Journal of General Virology, 97, 8 (2016):1853-1864.)

[0248] In many embodiments, any variant of the SARS-CoV-2 S protein may be used in the recombinant VSV vector, recombinant VSV particle, immunogenic recombinant protein, or SARS-CoV-2 vaccine of the present disclosure. In some embodiments, the variant may be of equal (i.e., full-length), shorter, or longer length when compared to the wild-type SARS-CoV-2 S protein. In some embodiments, the variant comprises truncations or fragments of the wild-type SARS-CoV-2 S protein. In some embodiments, the variant comprises point mutations, silent mutations, synonymous mutations, nonsynonymous mutations, nonsense mutations, deletions, and/or insertions. In some embodiments, the variant comprises at least one mutation and/or truncation relative to the wild-type SARS-CoV-2 S protein (SEQ ID NO: 1). In some embodiments, the SARS-CoV-2 S protein comprises an amino acid sequence having a length of at least 1223, 1228, 1233, 1238, 1243, 1248, 1249, 1250, 1251, 1252, 1253, 1254, 1255, 1256, 1257, 1258, 1259, 1260, 1261, 1262, 1263, 1264, 1265, 1266, 1267, 1268, 1269, 1270, 1271, 1272, 1273, 1274, 1275, 1276, 1277 or 1278 amino acids and having homology over its own length of at least 90, 91, 92, 93, 94, 95, 96, 97, 98, or 99% homology to any one of SEQ ID NOS: 1, 4, 7, 10, 13, 16, 19, 22, 25-67, 153, or 158. In some embodiments, the SARS-CoV-2 S protein or immunogenic variant thereof (or the nucleotide sequence encoding it) comprises any one of SEQ ID NOS: 1, 4, 7, 10, 13, 16, 19, 22, 25-67, 153, or 158.

[0249] Advantageously, codons may be optimized for the SARS-CoV-2 S gene so it has the codon bias that is characteristic of VSV. This also results in a relatively low Guanine+Cytosine content of 40-45%. See, e.g., Rabinovich et al., PLoS One. 2014 Sep. 12; 9(9):e106597. doi: 10.1371/journal.pone.0106597. eCollection 2014. Adaptive mutations may also be used to identify variants of the SARS-CoV-2 S protein gene capable of improving replication capacity of a recombinant VSV comprising the SARS-CoV-2 S gene.

[0250] The nucleotide sequence encoding a SARS-CoV-2 S protein may comprise any of the nucleotide sequences of SEQ ID NOS: 2, 3, 5, 6, 8, 9, 11, 12, 14, 15, 17, 18, 20, 21, 23, and 24, as shown in FIG. 1B, 1C, 1E, 1F, 1H, 1I, 1K, 1L, 1N, 1O, IQ, 1R, 1T, 1U, 1W or 1X; any nucleotide sequence encoding a SARS-CoV-2 S protein chosen from SARS-CoV-2 genome sequences that are readily available to a skilled artisan at Genbank, including but not limited to LR757997, MT072688, MN996527, MT039873, MN938384, MT020781, MN996529, MN996530, MN996531, MT044258, LR757998, LR757996, MT066175, MT066176, LR757995, LC522972, LC522973, LC522974, LC522975, MT039887, MN988668, MN988669, MT044257, MT039888, MN997409, MN985325, MN994467, MT027062, MT027063, MT027064, MT020880, MT020881, MN988713, MT019533, MN994468, MT093571, MT019530, MT019532, MN975262, MN996528, MT007544, MT019529, MT019531, MT049951, MT039890, MN908947, NC_045512, MT093631; or any of the amino acid sequences of SEQ ID NOS: 1, 4, 7, 10, 13, 16, 19, 22, 25-67, 153, or 158. The SARS-CoV-2 S protein may comprise any of the amino acid sequences of SEQ ID NOS: 1, 4, 7, 10, 13, 16, 19, 22, 25-67, 153, or 158. The SARS-CoV-2 S protein may comprise any amino acid sequence encoded by all or part of the nucleic acid sequences referenced herein.

[0251] In many embodiments, the SARS-CoV-2 S protein may have an amino acid sequence of at least 70%, 80%, 90%, 95%, 99%, or 100% identical to the amino acid sequence of any of the specific SARS-CoV-2 S proteins referenced herein. In many embodiments, the SARS-CoV-2 S protein of the present disclosure may comprise a nucleotide sequence that is a fragment of the wild-type SARS-CoV-2 S protein nucleotide sequence or a nucleotide sequence of a SARS-CoV-2 S protein nucleotide sequence having at least one modification (e.g., deletion, addition, substitution). The SARS-CoV-2 S protein may comprise at least one mutation relative to SEQ ID NO: 1.

[0252] In many embodiments, the SARS-CoV-2 S protein is an immunogenic variant that is capable of inducing an immune response in a subject administered the immunogenic variant. General descriptions on immunogenic recombinant proteins as well as details that relate to immunogenic SARS-CoV-2 S protein variants are described in Section III below.

[0253] 1. Optional Deletions to the SARS-CoV-2 S Protein

[0254] A variety of C-terminal deletions have been observed in variants of the SARS-CoV-2 S protein (see Example 8 below), which may provide a benefit by improving viral stability. In many embodiments, the SARS-CoV-2 S protein comprises a C-terminal deletion. The SARS-CoV-2 S protein may be a fragment of the wild-type SARS-CoV-2 S protein. SARS-CoV-2 S proteins with optional deletion(s) are provided herein. In some embodiments, the SARS-CoV-2 S protein is the same length as or is a fragment of the full-length of the SARS-CoV-2 S protein. In some embodiments, the deleted SARS-CoV-2 S protein is an immunogenic recombinant protein.

[0255] In some embodiments, distinct domains or subunits of the SARS-CoV-2 S protein are removed to produce the immunogenic variant. Distinct domains or subunits that are removed from the SARS-CoV-2 S protein may be chosen from S1 subunit, S2 subunit, S1/S2 cleavage site, protease cleavage site, signal peptide, NTD, RBD, FP, HR1, HR2, and CT.

[0256] In some embodiments, deletions of the SARS-CoV-2 S protein are made starting from the C-terminus of SEQ ID NO: 1 or any of the other variants of the S protein described herein. The full-length SARS-CoV-2 S protein comprises 1273 amino acids. A fragment length of SARS-CoV-2 S protein is calculated by subtracting the number of deleted amino acids from 1273. In some embodiments, the SARS-CoV-2 S protein is 1223, 1228, 1233, 1238, 1243, 1248, 1249, 1250, 1251, 1252, 1253, 1254, 1255, 1256, 1257, 1258, 1259, 1260, 1261, 1262, 1263, 1264, 1265, 1266, 1267, 1268, 1269, 1270, 1271, 1272, 1273, 1274, 1275, 1276, 1277 or 1278 amino acids. In some embodiments, the SARS-CoV-2 S protein may comprise a fragment of the SARS-CoV-2 S protein having a deletion at the C-terminal end of the SARS-CoV-2 S protein. In some embodiments, the SARS-CoV-2 S protein comprises a deletion of 1, 2, 3, 4, 5, 6, 7, 8, 9, 10, 11, 12, 13, 14, 15, 16, 17, 18, 19, 20, 21, 22, 23, 24, 25, 30, 35, 40, 45, or 50 amino acids from the C-terminal end of an S protein described herein with the deletion measured relative to the length of SEQ ID NO: 1.

[0257] In some embodiments, the SARS-CoV-2 S protein may have a deletion of from 1 to 30, 5 to 25, or 9 to 23 amino acids from the C-terminal end of the SARS-CoV-2 S protein. The SARS-CoV-2 S protein may comprise a fragment of the SARS-CoV-2 S protein having a deletion of 9 amino acids (Δ9), 13 amino acids (Δ13), 19 amino acids (Δ19), 21 amino acids (Δ21), or 23 amino acids (Δ23) at the C-terminal end of the SARS-CoV-2 S protein. In some embodiments, the SARS-CoV-2 S protein comprises a deletion of 1 to 30, 5 to 25, or 9 to 23 amino acids from the C-terminal end of SEQ ID NO: 1. In some embodiments, the SARS-CoV-2 S protein comprises a deletion of 9 amino acids (Δ9), 13 amino acids (Δ13), 19 amino acids (Δ19), 21 amino acids (Δ21) or 23 amino acids (Δ23) from the C-terminal end of SEQ ID NO: 1 or a relative length of another variant described herein.

[0258] The full-length SARS-CoV-2 S protein comprises a cytoplasmic tail and a transmembrane domain at the C-terminal end. In some embodiments, the SARS-CoV-2 S protein may comprise a fragment of the SARS-CoV-2 S protein lacking the cytoplasmic tail of the SARS-CoV-2 S protein. In some embodiments, the SARS-CoV-2 S protein does not comprise the entire cytoplasmic tail. In some embodiments, the SARS-CoV-2 S protein may lack a cytoplasmic tail in part or in its entirety.

[0259] In some embodiments, the SARS-CoV-2 S protein may lack the transmembrane domain of the SARS-CoV-2 S protein. The SARS-CoV-2 S protein may comprise a fragment of the SARS-CoV-2 S protein lacking the cytoplasmic tail and the transmembrane domain of the SARS-CoV-2 S protein or a variant thereof.

[0260] An ERRS (endoplasmic reticulum retention sequence (amino acids 1251-1255 of the SARS-CoV-2 S protein disclosed in Ujike, M. et al., Journal of General Virology, 97, 8 (2016):1853-1864) lies within the cytoplasmic tail of the full-length SARS-CoV-2 S protein. In some embodiments, the SARS-CoV-2 S protein does not comprise ERRS in part or in its entirety.

[0261] In some embodiments, a deletion of the SARS-CoV-2 S protein occurs at position 1251 relative to SEQ ID NO: 1. In some of these embodiments, the codon encoding amino acid 1251 was changed to a stop codon, which causes amino acid 1251 and subsequent amino acids to be absent. In these embodiments, amino acid 1251 is deleted. In some embodiments, the SARS-CoV-2 S protein has a 23 amino acid deletion at the C-terminal cytoplasmic tail. In some of these embodiments, the 23 amino acid deletion includes deletion of amino acid at position 1251 relative to SEQ ID NO: 1. In some embodiments, the following amino acids are deleted from the C-terminus of SARS-CoV-2 S protein: GSCCKFDEDDSEPVLKGVKLHYT (SEQ ID NO: 193).

[0262] In some embodiments, the SARS-CoV-2 of the S protein does not comprise a 24 amino acid deletion at the C-terminal cytoplasmic tail. In some embodiments, the SARS-CoV-2 S protein does not comprise a 21-amino acid deletion at the C-terminal cytoplasmic tail.

[0263] In some embodiments, the SARS-CoV-2 S gene does not comprise a TGC to TGA mutation at nucleotide 3759. In some embodiments, the SARS-CoV-2 S protein does not comprise a cysteine to stop mutation at amino acid 1253. In some embodiments, the SARS-CoV-2 S protein does not comprise an alanine mutation at amino acid 1269 and/or 1271.

[0264] 2. Optional Fusion of SARS-CoV-2 S Protein with Virus Glycoprotein

[0265] In some embodiments, the SARS-CoV-2 S protein comprises (1) a cytoplasmic tail and a transmembrane domain of a virus glycoprotein protein; and (2) a fragment of the SARS-CoV-2 S protein lacking a cytoplasmic tail and a transmembrane domain. In these embodiments, the cytoplasmic tail and the transmembrane domain of the SARS-CoV-2 S protein are replaced by the cytoplasmic tail and transmembrane domain of the virus glycoprotein protein. In some embodiments, the SARS-CoV-2 S protein may lack a SARS-CoV-2 S protein cytoplasmic tail and/or a SARS-CoV-2 S protein transmembrane domain in part or in its entirety. When expressed, the cytoplasmic tail and the transmembrane domain of the virus glycoprotein protein and the SARS-CoV-2 S protein lacking its cytoplasmic tail and transmembrane domain may form a fusion protein, wherein the cytoplasmic tail and the transmembrane domain of the SARS-CoV-2 S protein are replaced by the cytoplasmic tail and transmembrane domain of the virus glycoprotein protein. In some embodiments, the virus glycoprotein is VSV-G. Details on VSV-G are provided in Section II.C.2 below. The SARS-CoV-2 S protein may comprise the amino acid sequence in FIG. 1D, 1G, 1J, 1M, 1P, 1S or 1V (SEQ ID NO: 4, 7, 10, 13, 16, 19 or 22, respectively).

[0266] 3. Optional Substitution Mutations to the SARS-CoV-2 S Protein

[0267] In many embodiments, the SARS-CoV-2 S protein may comprise at least one substitution mutation. In some embodiments, the at least one mutation relative to SEQ ID NO: 1 is along the length of the immunogenic variant.

[0268] Point mutations have been observed in the Furin cleavage site of SARS-CoV-2 S protein following passage in Vero cells, which may indicate that these point mutations are adaptive mutations to the Vero host cell line. The at least one mutation may be in the exposed loop (a solvent-exposed loop (amino acids 673-691 in SEQ ID NO: 1) that comprises the S1/S2 cleavage site (SPRRARSV, which are amino acids 680-687 in SEQ ID NO: 1, wherein cleavage occurs between R685 and S686)) of the SARS-CoV-2 S protein. Further, the at least one mutation may reduce or block S1/S2 cleavage of the SARS-CoV-2 S protein by, for example, 10%, 20%, 30%, 40%, 50%, 60%, 70%, 80%, 90%, 91%, 92%, 93%, 94%, 95%, 96%, 97%, 98%, 99%, or 100%, as compared with that of a wild-type SARS-CoV-2 S protein without the at least one mutation. The at least one mutation may be in the S2′ cleavage site (Cathepsin H, L; amino acids 810-817 in SEQ ID NO: 1, wherein cleavage occurs between 815R and 816S) of the SARS-CoV-2 S protein and such at least one mutation may modulate S2′ cleavage of the SARS-CoV-2 S protein by, for example, 10%, 20%, 30%, 40%, 50%, 60%, 70%, 80%, 90%, 91%, 92%, 93%, 94%, 95%, 96%, 97%, 98%, 99%, or 100%, as compared with that of a wild-type SARS-CoV-2 S protein without the at least one mutation. The at least one mutation may be in the C-terminal end of the SARS-CoV-2 S protein.

[0269] In some embodiments, the at least one mutation in the SARS-CoV-2 S protein or SEQ ID NO: 1 may be chosen from a mutation at residue 655, at least one mutation from residue 672 to residue 687, at least one mutation from residue 802 to residue 817, at least one mutation from residue 1233 to residue 1273, and combinations thereof. In some embodiments, the mutation at residue 655 in SEQ ID NO: 1 may be H655Y. In some embodiments, the at least one mutation between residues 672 and 687 in SEQ ID NO: 1 may be from residue 678 to residue 685, which may be chosen from T678I, P681S, R682K, R683G, R685G and combinations thereof. In some embodiments, the at least one mutation from residue 802 to residue 817 in SEQ ID NO: 1 may be from residue 810 to residue 815, which may be chosen from P812R, S813R, S813F and combinations thereof. In some embodiments, the at least one mutation from residue 1233 to residue 1273 in SEQ ID NO: 1 may be chosen from a deletion at the C-terminal end of the SEQ ID NO: 1, M1233K and a combination thereof.

[0270] In many embodiments, the at least one mutation in SEQ ID NO: 1, either in isolation or in any combination, comprises H655Y, R682K, R683G, N709S, S813F, N978K, S940G, D1118A, and/or D1163N.

[0271] In some embodiments, the SARS-CoV-2 S protein may further comprise at least one mutation in SEQ ID NO: 1 chosen from F140V, Q321P, N715S, D1118A and combinations thereof.

[0272] In some embodiments, the SARS-CoV-2 S protein may further comprise at least one mutation in SEQ ID NO: 1 chosen from E154D, S115L, D614G, D614N, R685G, or combinations thereof.

[0273] In some embodiments, the at least one mutation in SEQ ID NO: 1 does not comprise a mutation at R685.

[0274] C. VSV Components

[0275] 1. VSV N, P, M, and L Genes

[0276] The VSV genome is composed of 5 genes encoding a VSV nucleoprotein (VSV-N), a VSV phosphoprotein (VSV-P), a VSV matrix protein (VSV-M), a VSV glycoprotein (VSV-G) and a VSV polymerase (VSV-L) and arranged sequentially 3′-N-P-M-G-L-5′. Each gene encodes a polypeptide found in mature virions

[0277] In many embodiments, a recombinant VSV vector, recombinant VSV particle, or SARS-CoV-2 vaccine may comprise a modified VSV genome or at least a portion of the VSV genome. In some embodiments, the VSV genome comprises the VSV-N, VSV-P, VSV-M, and VSV-L genes or any combination thereof. In some embodiments, the VSV genome does not comprise the VSV-G gene. In some embodiments, the VSV genome may comprise at least a fragment of the VSV-G gene. VSV-G and variants thereof are described in Section II.C.2 below.

[0278] In some embodiments, the VSV genome comprises at least one mutation in at least one of the VSV genes. In many embodiments, any variant of the VSV genes or VSV proteins may be used in the recombinant VSV vector, recombinant VSV particle, immunogenic recombinant protein, or SARS-CoV-2 vaccine of the present disclosure. In some embodiments, the variant may be of equal (i.e., full-length), shorter, or longer length when compared to a wild-type protein sequence of a VSV gene. In some embodiments, the variant comprises deletions or fragments of the wild-type protein sequence of a VSV gene. In some embodiments, the variant comprises point mutations, silent mutations, synonymous mutations, nonsynonymous mutations, nonsense mutations, deletions, and/or insertions.

[0279] In some embodiments, the variant comprises at least one mutation and/or deletion relative to the wild-type VSV-M protein (SEQ ID NO: 157). In some embodiments, the VSV-M protein comprises an amino acid sequence having homology over its own length of at least 90, 91, 92, 93, 94, 95, 96, 97, 98, or 99% homology to SEQ ID NO: 151 or 157. In some embodiments, the VSV-M protein comprises Y61S. In some embodiments, the VSV-M protein or immunogenic variant thereof comprises SEQ ID NO: 151.

[0280] In some embodiments, the variant comprises at least one mutation and/or deletion relative to the wild-type VSV-L protein (SEQ ID NO: 152). In some embodiments, the VSV-L protein comprises an amino acid sequence having homology over its own length of at least 90, 91, 92, 93, 94, 95, 96, 97, 98, or 99% homology to SEQ ID NO: 152 or 158. In some embodiments, the VSV-L protein comprises a I1343I silent mutation.

[0281] In some embodiments, the modified VSV genome may comprise a foreign gene encoding the SARS-CoV-2 S protein or an immunogenic variant thereof. SARS-CoV-2 S protein and variants thereof are described in Section II.B above. Immunogenic recombinant proteins are described in Section III below.

[0282] All numbering of the VSV proteins in the disclosure and claims is relative to wildtype versions. This includes both position numbers and numbers of amino acids deleted from certain deletion mutations. Unless otherwise specified by referring to a particular variant or by specifically referring to wildtype, all references in the disclosure and claims to the VSV proteins include both the wildtype and mutant forms of the VSV proteins (including variants that have substitution mutations, insertion mutations, deletion mutations (including fragments, which are shorter in length than wildtype), and/or modifications).

[0283] 2. Optional Mutations with VSV Glycoprotein

[0284] VSV-G is a transmembrane polypeptide that is present in the viral envelope as a homotrimer, and like the envelope protein, mediates cell attachment and infection. VSV-G comprises a cytoplasmic tail and a transmembrane domain at the C-terminal end. In some embodiments, the recombinant VSV vector, recombinant VSV particle, immunogenic recombinant protein, or SARS-CoV-2 vaccine of the present disclosure does not comprise a VSV-G.

[0285] In other embodiments, the recombinant VSV vector, recombinant VSV particle, immunogenic recombinant protein, or SARS-CoV-2 vaccine comprises a VSV-G gene/protein or at least a fragment thereof. In some embodiments, the VSV-G protein or fragment thereof is covalently linked to a SARS-CoV-2 S protein. Details relating to recombinant VSV vectors and recombinant VSV particles are provided in Section II.A above. Details relating to immunogenic recombinant proteins are provided in Section III below. Details relating to vaccines are provided in Section IV.A below. The VSV-G variant may be a fragment of the VSV-G nucleotide sequence or a fragment of the VSV-G amino acid sequence, wherein the nucleotide or amino acid sequence may have at least one modification (e.g., deletion, addition, or substitution). In some embodiments, the cytoplasmic tail is absent, in part or in its entirety, from the VSV-G. In some embodiments, the cytoplasmic tail and the transmembrane domain are absent, in part or in their entirety, from the VSV-G.

[0286] In some embodiments, the VSV-G gene encodes a cytoplasmic tail of a VSV-G protein and/or a transmembrane domain of a VSV-G protein. In some embodiments, the VSV-G protein comprises a fragment of at least 21 amino acids at the C-terminal end of full-length VSV-G protein; or a fragment of at least 29 amino acids at the C-terminal end of full-length VSV-G protein. In some embodiments, the fragment of the VSV-G protein may comprise from 21 to 29 amino acids at the C-terminal end of the full-length VSV-G protein.

[0287] In some embodiments, the recombinant VSV vector, recombinant VSV particle, or SARS-CoV-2 vaccine comprises a fusion gene wherein a fragment of VSV-G gene is operably linked to nucleotide sequence encoding a fragment of SARS-CoV-2 S protein. In related embodiments, the recombinant VSV particle or SARS-CoV-2 vaccine comprises a fusion protein, wherein the VSV-G protein is expressed as a fragment that is covalently linked to a SARS-CoV-2 S protein fragment. In these embodiments, as described in detail in Section II.B.2 above, the SARS-CoV-2 S protein fragment lacks a SARS-CoV-2 S protein cytoplasmic tail and a SARS-CoV-2 S protein transmembrane domain, and has a VSV-G cytoplasmic tail and VSV-G transmembrane domain instead.

[0288] D. Arrangement of Elements in a Recombinant VSV Vector

[0289] In the recombinant VSV vector of the present disclosure, the modified VSV genome may comprise VSV genes, such as the VSV-N, VSV-P, VSV-M, and VSV-L genes or any combination thereof. These VSV-N, VSV-P, VSV-M, and VSV-L genes may be arranged in sequence from 3′ end to 5′ end. The foreign gene may be at any location in the modified VSV genome. For example, the foreign gene may be inserted on the 3′ end of the VSV-N gene, between the VSV-N gene and the VSV-P gene, between the VSV-P gene and the VSV-M gene, between the VSV-M gene and the VSV-L gene, or on the 5′ end of the VSV-L gene.

[0290] In some embodiments, the foreign gene is a nucleotide sequence encoding the SARS-CoV-2 S protein or immunogenic variant thereof. In a recombinant VSV vector, the VSV genes and the SARS-CoV-2 S protein or immunogenic variant thereof may be arranged in a variety of ways. In some embodiments, the nucleic acid sequence encoding the SARS-COV-2 S protein or an immunogenic variant thereof is 3′ of the VSV-N gene. In some embodiments, the nucleic acid sequence encoding the SARS-COV-2 S protein or an immunogenic variant thereof is on the 3′ end of the VSV-N gene. In some embodiments, the nucleic acid sequence encoding the SARS-COV-2 S protein or an immunogenic variant thereof is between the VSV-N gene and the VSV-P gene. In some embodiments, the nucleic acid sequence encoding the SARS-COV-2 S protein or an immunogenic variant thereof is between the VSV-P gene and the VSV-M gene. In some embodiments, the SARS-COV-2 S protein or an immunogenic variant thereof is between the VSV-M gene and the VSV-L gene. In some embodiments, the nucleic acid sequence encoding the SARS-COV-2 S protein or an immunogenic variant thereof is 5′ of the VSV-L gene. In some embodiments, the nucleic acid sequence encoding the SARS-COV-2 S protein or an immunogenic variant thereof is on the 5′ end of the VSV-L gene.

[0291] E. Exemplary Variants of the SARS-CoV-2 S Protein and VSV Proteins

[0292] The recombinant VSV vectors, recombinant VSV particles, immunogenic recombinant proteins, and SARS-CoV-2 vaccines of the present disclosure may comprise one of the following exemplary mutants of the SARS-CoV-2 S protein (SEQ ID NO: 1):

[0293] (1) H655Y, R682K, and R685G;

[0294] (2) H655Y, R682K, R685G, and a deletion of the 9 amino acids (Δ9) at the C-terminal end of the amino acid sequence of SEQ ID NO: 1;

[0295] (3) H655Y, R682K, R685G, and a deletion of the 13 amino acids (Δ13) at the C-terminal end of the amino acid sequence of SEQ ID NO: 1;

[0296] (4) Q321P, H655Y, T678I, and P812R;

(5) Q321P, H655Y, T678I, P812R, and a deletion of the 23 amino acids (Δ23) at the C-terminal end of the amino acid sequence of SEQ ID NO: 1;

[0297] (6) E154D, S155L, T678I, R685G, and M1233K;

[0298] (7) R685G, S813R, and a deletion of the 9 amino acids (Δ9) at the C-terminal end of the amino acid sequence of SEQ ID NO: 1;

[0299] (8) H655Y, R682K, and a deletion of the 13 amino acids (Δ13) at the C-terminal end of the amino acid sequence of SEQ ID NO: 1;

[0300] (9) R685G, S813F, and a deletion of the 9 amino acids (Δ9) at the C-terminal end of the amino acid sequence of SEQ ID NO: 1;

[0301] (10) R683G, S813F and a deletion of the 23 amino acids (Δ23) at the C-terminal end of the amino acid sequence of SEQ ID NO: 1;

[0302] (11) R683G, S813F, R685G, and a deletion of 23 amino acids (Δ23) at the C-terminal end of the amino acid sequence of SEQ ID NO: 1;

[0303] (12) H655Y, P681S, R682K, and a deletion of the 13 amino acids (Δ13) at the C-terminal end of the amino acid sequence of SEQ ID NO: 1;

[0304] (13) R683G and a deletion of the 23 amino acids (Δ23) at the C-terminal end of the amino acid sequence of SEQ ID NO: 1;

[0305] (14) H655Y and a deletion of the 23 amino acids (Δ23) at the C-terminal end of the amino acid sequence of SEQ ID NO: 1;

[0306] (15) R683G, D1118A, and a deletion of the 23 amino acids (Δ23) at the C-terminal end of the amino acid sequence of SEQ ID NO: 1;

[0307] (16) R683G, N715S, and a deletion of the 23 amino acids (Δ23) at the C-terminal end of the amino acid sequence of SEQ ID NO: 1;

[0308] (17) H655Y, N709S, and a deletion of the 13 amino acids (Δ13) at the C-terminal end of the amino acid sequence of SEQ ID NO: 1;

[0309] (18) F140V, H655Y and a deletion of the 23 amino acids (Δ23) at the C-terminal end of the amino acid sequence of SEQ ID NO: 1;

[0310] (19) a deletion of the 21 amino acids (Δ21) at the C-terminal end of the amino acid sequence of SEQ ID NO: 1;

[0311] (20) a deletion of the 19 amino acids (Δ19) at the C-terminal end of the amino acid sequence of SEQ ID NO: 1, wherein the SARS-CoV-2 S protein further comprises a fragment of at least 21 amino acids at the C-terminal end of a VSV-G protein;

[0312] (21) E484D, H655Y, and a deletion of 21 amino acids (Δ21) at the C-terminal end of the amino acid sequence of SEQ ID NO: 1;

[0313] (22) H665Y, R685G and a deletion of the 19 amino acids (Δ19) at the C-terminal end of the amino acid sequence of SEQ ID NO: 1, wherein the SARS-CoV-2 S protein further comprises a fragment of at least 21 amino acids at the C-terminal end of a VSV-G protein;

[0314] (23) D614G; or

[0315] (24) D614N.

[0316] In addition to an exemplary mutant of SARS-CoV-2 S protein, the recombinant VSV vectors, recombinant VSV particles, immunogenic recombinant proteins, and SARS-CoV-2 vaccines of the present disclosure may comprise any or all of the following exemplary mutants of the VSV proteins:

[0317] (1) Y61S in VSV-M;

[0318] (2) E213K in VSV-M; and/or

[0319] (3) V411M in VSV-L.

[0320] F. Exemplary Recombinant VSV Vectors

[0321] In many embodiments, the recombinant VSV vectors, recombinant VSV particles, and SARS-CoV-2 vaccines of the present disclosure may comprise a modified VSV genome and a nucleotide sequence encoding SARS-CoV-2 S protein or immunogenic variant thereof, arranged in a variety of ways on a VSV vector backbone. Details and variants relating to modified VSV genomes and VSV components; and SARS-CoV-2 S proteins are described in Sections II.A.1 and II.C; and II.B, respectively. In some embodiments, the recombinant VSV vectors, recombinant VSV particles, and SARS-CoV-2 vaccines do not comprise VSV-G. In other embodiments, the recombinant VSV vectors, VSV particles, and SARS-CoV-2 vaccines may comprise VSV-G or a fragment thereof.

[0322] In some embodiments, the recombinant VSV vector, recombinant VSV particle, or SARS-CoV-2 vaccine comprises R683G, S813F and a deletion of the 23 amino acids (Δ23) at the C-terminal end of the amino acid sequence of SEQ ID NO: 1; and Y61S in VSV-M. In some embodiments, the recombinant VSV vector is rVSVΔG-SARS-CoV-2 clone MB1 (which has the nucleic acid sequence SEQ ID NO: 150; amino acid sequences SEQ ID NOS: 151-153, 155, and 156; and FIGS. 24A-G). The recombinant VSV vector rVSVΔG-SARS-CoV-2 clone MB1 does not comprise VSV-G. In some embodiments with these mutations, the recombinant VSV vector, particle, or vaccine does not comprise VSV-G in its entirety, but comprises it in part, such as the 21 amino acids of the cytoplasmic tail.

[0323] In some embodiments, the recombinant VSV vector, recombinant VSV particle, or SARS-CoV-2 vaccine comprises H655Y and a deletion of the 23 amino acids (Δ23) at the C-terminal end of the amino acid sequence of SEQ ID NO: 1. In some embodiments, the recombinant VSV vector is rVSVΔG-SARS-CoV-2 clone MB2 (which has the nucleic acid sequence SEQ ID NO: 154; amino acid sequences SEQ ID NOS: 152, 155, 156, 157, and 158; FIGS. 21A-G). The recombinant VSV vector rVSVΔG-SARS-CoV-2 clone MB2 does not comprise VSV-G. In some embodiments with these mutations, the recombinant VSV vector, particle, or vaccine does not comprise VSV-G in its entirety, but comprises it in part, such as the 21 amino acids of the cytoplasmic tail.

### III. Immunogenic Recombinant Proteins

[0324] The recombinant VSV vectors, recombinant VSV particles, immunogenic recombinant proteins, or SARS-CoV-2 vaccines of the present disclosure may produce or comprise an immunogenic recombinant protein. An immunogenic recombinant protein is capable of inducing an immune response in a subject administered the immunogenic recombinant protein. In some embodiments, the immunogenic recombinant protein may induce an immune response capable of blocking at least 10%, 20%, 30%, 40%, 50%, 60%, 70%, 80%, 90%, 91%, 92%, 93%, 94%, 95%, 96%, 97%, 98%, 99% or 100% of SARS-CoV-2 infection in a subject administered the immunogenic recombinant protein as compared with a control subject not administered the immunogenic recombinant protein. The term “immunogenic variant” refers to a variant of an immunogenic protein that induces at least a portion of the immune response of the wild-type protein. In some embodiments, the variant is an immunogenic variant that induces a relevant immune response in vaccinated individuals to enable protection against COVID-19. In some embodiments, the immunogenic variant may induce an immune response capable of blocking at least 10%, 20%, 30%, 40%, 50%, 60%, 70%, 80%, 90%, 91%, 92%, 93%, 94%, 95%, 96%, 97%, 98%, 99%, or 100% of a SARS-CoV-2 infection in a subject administered with the immunogenic variant as compared with a control subject administered the SARS-CoV-2 S protein. In some embodiments, the variant comprises a sequence that shares homology with the wild-type SARS-CoV-2 S protein (SEQ ID NO: 1), wherein homology is at least 90% similarity with the variant as the reference protein sequence.

[0325] In some embodiments, the immunogenic recombinant protein is a variant that may have an amino acid length that is the same as or a fragment of the full-length of the immunogenic recombinant protein. In many embodiments, the immunogenic recombinant protein may comprise a full-length SARS-CoV-2 S protein, fragments thereof, or mutant variants thereof, that are expressed by the recombinant VSV vector or recombinant VSV particle of the present disclosure. In embodiments where the immunogenic recombinant protein is not the full-length or wild-type SARS-CoV-2 S protein, the immunogenic recombinant protein is an immunogenic variant of the SARS-CoV-2 S protein. Details on full-length SARS-CoV-2 S protein, fragments thereof, and mutants thereof are provided in Section II.B above. Details on recombinant VSV vectors and recombinant VSV particles are provided in Section II.A above.

[0326] In some embodiments, the immunogenic variant is a fragment of the SARS-CoV-2 S protein having a deletion at the C-terminal end. In some embodiments, distinct domain of the SARS-CoV-2 S protein are removed to produce an immunogenic variant. In other embodiments, specific fragment lengths are deleted from the SARS-CoV-2 S protein. The distinct domains and specific fragments are discussed in Section II.B above.

[0327] The immunogenic variant of the SARS-CoV-2 S protein may comprise a fragment of the SARS-CoV-2 S protein or a variant thereof (the SARS-CoV-2 S protein fragment), and a portion of a VSV-G or a variant thereof (the VSV-G protein portion). In some embodiments, the SARS-CoV-2 S protein fragment lacks the cytoplasmic tail of the SARS-CoV-2 S protein, and the VSV-G protein portion comprises the cytoplasmic tail of the VSV-G protein. In some embodiments, the SARS-CoV-2 S protein may lack a cytoplasmic tail in part or in its entirety. In another embodiment, the SARS-CoV-2 S protein fragment lacks the cytoplasmic tail and the transmembrane domain of the SARS-CoV-2 S protein, and the VSV-G protein portion comprises the cytoplasmic tail and the transmembrane domain of the VSV-G protein. Details on the VSV-G protein are provided above in Section II.C.2.

[0328] In some embodiments, the immunogenic recombinant protein comprises VSV and SARS-CoV-2 proteins in rVSVΔG-SARS-CoV-2 clone MB1 (specifically amino acid SEQ ID NOS: 151-153, 155, and 156) or VSV and SARS-CoV-2 protein in rVSVΔG-SARS-CoV-2 clone MB2 (specifically amino acid SEQ ID NOS: 152 and 155-158).

[0329] In some embodiments, the SARS-CoV-2 vaccine comprises rVSVΔG-SARS-CoV-2 clone MB1 (nucleic acid sequence SEQ ID NO: 150; or amino acid sequences SEQ ID NO: 151-153, 155, and 156:) or rVSVΔG-SARS-CoV-2 clone MB2 (nucleic acid sequence SEQ ID NO: 154; or amino acid sequences SEQ ID NO: 155-158, and 152). Details on rVSVΔG-SARS-CoV-2 clones MB1 and MB2 are provided in Section II.F above.

### IV. Pharmaceutical Compositions

[0330] The present disclosure further provides pharmaceutical compositions that may comprise any recombinant VSV vector, recombinant VSV particle, immunogenic recombinant protein, or SARS-CoV-2 vaccine of the present disclosure. Recombinant VSV vectors and VSV particles are described in Section II.A above while the VSV components are described in Section II.C above. The SARS-CoV-2 S protein and variants thereof are described in Section II.B above, while immunogenic variants are described in Section III above.

[0331] The recombinant VSV vector, recombinant VSV particle, immunogenic recombinant protein, or SARS-CoV-2 vaccine may be produced according to the methods disclosed herein and provided to a pharmaceutical composition. In particular, methods for producing recombinant VSV particles are described in Section V below.

[0332] In some embodiments, the pharmaceutical composition comprises an effective amount of a recombinant VSV vector, recombinant VSV particle, immunogenic recombinant protein, and/or SARS-CoV-2 vaccine to generate an immune response against SARS-CoV-2 in a subject. In some embodiments, the pharmaceutical composition is a vaccine composition. In many embodiments, the pharmaceutical composition, including a vaccine composition, comprises at least one pharmaceutical excipient.

[0333] The pharmaceutical composition, including a vaccine composition, may be formulated for oral (including oral mucosal, buccal, and/or gastrointestinal) sublingual, intramuscular, intradermal, subcutaneous, intranasal (including nasal mucosal), intraocular, rectal, transdermal, mucosal, topical, intravenous, or parenteral administration.

[0334] The pharmaceutical compositions of the disclosure may be injectable suspensions, solutions, sprays, lyophilized powders, syrups, elixirs and the like. Any suitable form of pharmaceutical composition may be used. To prepare such a pharmaceutical composition, a nucleic acid molecule or vector of the disclosure, having the desired degree of purity, is mixed with one or more pharmaceutically acceptable carriers and/or excipients. The carriers and excipients must be “acceptable” in the sense of being compatible with the other ingredients of the composition. Acceptable carriers, excipients, or stabilizers are nontoxic to recipients at the dosages and concentrations employed, and include, but are not limited to, water, saline, phosphate buffered saline, dextrose, glycerol, ethanol, or combinations thereof, buffers such as phosphate, citrate, and other organic acids; antioxidants including ascorbic acid and methionine; preservatives (such as octadecyldimethylbenzyl ammonium chloride; hexamethonium chloride; benzalkonium chloride, benzethonium chloride; phenol, butyl or benzyl alcohol; alkyl parabens such as methyl or propyl paraben; catechol; resorcinol; cyclohexanol; 3-pentanol; and m-cresol); low molecular weight (less than 10 residues) polypeptide; proteins, such as serum albumin, gelatin, or immunoglobulins; hydrophilic polymers such as polyvinylpyrrolidone; amino acids such as glycine, glutamine, asparagine, histidine, arginine, or lysine; monosaccharides, disaccharides, and other carbohydrates including glucose, mannose, or dextrins; chelating agents such as EDTA; sugars such as sucrose, mannitol, trehalose or sorbitol; salt-forming counter-ions such as sodium; metal complexes (e.g., Zn-protein complexes); and/or nonionic surfactants such as TWEEN™, PLURONICS™ or polyethylene glycol (PEG).

[0335] The pharmaceutical composition may be an immunogenic or immunological composition. The pharmaceutical composition can be formulated in the form of an oil-in-water emulsion. The oil-in-water emulsion can be based, for example, on light liquid paraffin oil (European Pharmacopea type); isoprenoid oil such as squalane, squalene, EICOSANE™ or tetratetracontane; oil resulting from the oligomerization of alkene(s), e.g., isobutene or decene; esters of acids or of alcohols containing a linear alkyl group, such as plant oils, ethyl oleate, propylene glycol di(caprylate/caprate), glyceryl tri(caprylate/caprate) or propylene glycol dioleate; esters of branched fatty acids or alcohols, e.g., isostearic acid esters. The oil advantageously is used in combination with emulsifiers to form the emulsion. The emulsifiers can be nonionic surfactants, such as esters of sorbitan, mannide (e.g., anhydromannitol oleate), glycerol, polyglycerol, propylene glycol, and oleic, isostearic, ricinoleic, or hydroxystearic acid, which are optionally ethoxylated, and polyoxypropylene-polyoxyethylene copolymer blocks, such as the Pluronic® products, e.g., L121.

[0336] The pharmaceutical composition of the disclosure can contain additional substances, such as wetting or emulsifying agents, buffering agents, or adjuvants to enhance the effectiveness of the vaccines (Remington's Pharmaceutical Sciences, 18th edition, Mack Publishing Company, (ed.) 1980).

[0337] Adjuvants may also be included. As used herein, the term “adjuvant” refers to a composition or compound that is capable of enhancing the immune response against an antigen of interest. Adjuvants are substances or combinations of substances that are used in conjunction with a vaccine antigen to enhance (e.g., increase, accelerate, prolong and/or possibly target) or modulate to a different type (e.g., switch a Th1 immune response to a Th2 response, or a humoral response to a cytotoxic T cell response) the specific immune response to the vaccine antigen in order to enhance the clinical effectiveness of the vaccine. In some embodiments, the adjuvant may modify (Th1/Th2) the immune response. In some embodiments, the adjuvant may boost the strength and longevity of the immune response. In some embodiments, the adjuvant may broaden the immune response to a concomitantly administered antigen. In some embodiments, the adjuvant may be capable of inducing strong antibody and T cell responses. In some embodiments, the adjuvant may be capable of increasing the polyclonal ability of the induced antibodies. In some embodiments, the adjuvant may be used to decrease the amount of antigen necessary to provoke the desired immune response and provide protection against the disease. In some embodiments, the adjuvant may be used to decrease the number of injections needed in a clinical regimen to induce a durable immune response and provide protection against the disease. Adjuvant containing formulations described herein may demonstrate enhancements in humoral and/or cellular immunogenicity of vaccine antigens, for example, subunit vaccine antigens. Adjuvants of the present invention are not used to deliver antigens, antibodies, APIs, or VLPs.

[0338] Adjuvants include, but are not limited to, mineral salts (e.g., AlK(SO₄)₂, AlNa(SO₄)₂, AlNH(SO₄)₂, silica, alum, Al(OH)₃, Ca₃(PO₄)₂, kaolin, or carbon), polynucleotides with or without immune stimulating complexes (ISCOMs) (e.g., CpG oligonucleotides, such as those described in Chuang, T. H. et al, (2002) J. Leuk. Biol. 71(3): 538-44; Ahmad-Nejad, P. et al (2002) Eur. J. Immunol. 32(7): 1958-68; poly IC or poly AU acids, polyarginine with or without CpG (also known in the art as IC31; see Schellack, C. et al (2003) Proceedings of the 34th Annual Meeting of the German Society of Immunology; Lingnau, K. et al (2002) Vaccine 20(29-30): 3498-508), JuvaVax™ (U.S. Pat. No. 6,693,086), certain natural substances (e.g., wax D from Mycobacterium tuberculosis, substances found in Cornyebacterium parvum, Bordetella pertussis, or members of the genus Brucella), flagellin (Toll-like receptor 5 ligand; see McSorley, S. J. et al (2002) J. Immunol. 169(7): 3914-9), saponins such as QS21, QS17, and QS7 (U.S. Pat. Nos. 5,057,540; 5,650,398; 6,524,584; 6,645,495), monophosphoryl lipid A, in particular, 3-de-O-acylated monophosphoryl lipid A (3D-MPL), imiquimod (also known in the art as IQM and commercially available as Aldara®; U.S. Pat. Nos. 4,689,338; 5,238,944; Zuber, A. K. et al (2004) 22(13-14): 1791-8), and the CCR5 inhibitor CMPD167 (see Veazey, R. S. et al (2003) J. Exp. Med. 198: 1551-1562). The adjuvant can be a mixture of emulsifier(s), micelle-forming agent, and oil such as that which is commercially available under the name Provax® (IDEC Pharmaceuticals, San Diego, Calif.).

[0339] Aluminum hydroxide or phosphate (alum) are commonly used at 0.05 to 0.1% solution in phosphate buffered saline. Other adjuvants that can be used with DNA vaccine, are cholera toxin, CTA1-DD/ISCOMs (see Mowat, A. M. et al (2001) J. Immunol. 167(6): 3398-405), polyphosphazenes (Allcock, H. R. (1998) App. Organometallic Chem. 12(10-11): 659-666; Payne, L. G. et al (1995) Pharm. Biotechnol. 6: 473-93), cytokines such as, but not limited to, IL-2, IL-4, GM-CSF, IL-12, IL-15 IGF-1, IFN-α, IFN-β, and IFNγ (Boyer et al., (2002) J. Liposome Res. 121:137-142; WO01/095919), immunoregulatory proteins such as CD40L (ADX40; see, for example, WO03/063899), and the CD1a ligand of natural killer cells (also known as CRONY or α-galactosyl ceramide; see Green, T. D. et al, (2003) J. Virol. 77(3): 2046-2055), immunostimulatory fusion proteins such as IL-2 fused to the Fc fragment of immunoglobulins (Barouch et al., Science 290:486-492, 2000) and co-stimulatory molecules B7.1 and B7.2 (Boyer), all of which can be administered either as proteins or in the form of DNA, on the same expression vectors as those encoding the antigens of the disclosure or on separate expression vectors.

[0340] In an advantageous embodiment, the adjuvants may be lecithin is combined with an acrylic polymer (Adjuplex-LAP), lecithin coated oil droplets in an oil-in-water emulsion (Adjuplex-LE) or lecithin and acrylic polymer in an oil-in-water emulsion (Adjuplex-LAO) (Advanced BioAdjuvants (ABA)).

[0341] The compositions can be designed to introduce the nucleic acid molecules or expression vectors to a desired site of action and release them at an appropriate and controllable rate. Methods of preparing controlled-release formulations are known in the art. For example, controlled release preparations can be produced by the use of polymers to complex or absorb the immunogen and/or immunogenic composition. A controlled-release formulation can be prepared using appropriate macromolecules (for example, polyesters, polyamino acids, polyvinyl, pyrrolidone, ethylenevinylacetate, methylcellulose, carboxymethylcellulose, or protamine sulfate) known to provide the desired controlled release characteristics or release profile. Another possible method to control the duration of action by a controlled-release preparation is to incorporate the active ingredients into particles of a polymeric material such as, for example, polyesters, polyamino acids, hydrogels, polylactic acid, polyglycolic acid, copolymers of these acids, or ethylene vinylacetate copolymers. Alternatively, instead of incorporating these active ingredients into polymeric particles, it is possible to entrap these materials into microcapsules prepared, for example, by coacervation techniques or by interfacial polymerization, for example, hydroxymethylcellulose or gelatin-microcapsule and poly-(methylmethacrylate) microcapsule, respectively, in colloidal drug delivery systems (for example, liposomes, albumin microspheres, microemulsions, nano-particles and nanocapsules) or in macroemulsions. Such techniques are disclosed in New Trends and Developments in Vaccines, Voller et al. (eds.), University Park Press, Baltimore, Md., 1978 and Remington's Pharmaceutical Sciences, 16th edition.

[0342] A. SARS-CoV-2 Vaccine

[0343] The vectors and viral particles of the present disclosure are useful for providing vaccines for delivering the nucleic acids encoding the proteins of the disclosure to a subject, such as a human, such that the proteins are then expressed in the subject to elicit an immune response. A vaccine may comprise recombinant VSV vector, VSV particle, a SARS-CoV-2 S protein, and/or an immunogenic recombinant variant thereof. Recombinant VSV vectors and VSV particles are described in Section II.A above while the VSV components are described in Section II.C above. The SARS-CoV-2 S protein and variants thereof are described in Section II.B above, while immunogenic variants are described in Section III above. Details on methods of administration are provided in Section VII.A below. Immunogenic compositions are also encompassed by the use of the term vaccine throughout the disclosure and claims.

### V. Methods for Producing a Recombinant VSV Particles

[0344] Methods for producing a recombinant VSV particle may comprise introducing into cells a recombinant VSV vector of present disclosure such that a recombinant VSV particle is produced. Alternatively, the methods may comprise infecting cells with a recombinant VSV particle of the present disclosure, and then producing a recombinant VSV particle. In some embodiments, the methods further comprise expressing a SARS-CoV-2 S protein or an immunogenic variant thereof, wherein the SARS-CoV-2 S protein or immunogenic variant thereof may be presented on the surface of the recombinant VSV particle. Details on the recombinant VSV particle are provided in Section II.A.

[0345] The cells that may be used in a variety of embodiments are Vero cells, human 293 cells, MRC-5 cells, Vero E6 cells, Huh7 cells, DBT cells, Calu-3 2B4 cells or primary human airway epithelial cells. In some embodiments, the cell is a Vero cell.

[0346] The methods may further comprise purifying the recombinant VSV particle from the cells. The methods may further comprise purifying the SARS-CoV-2 S protein or immunogenic variant thereof from the cells. The methods may also comprise purifying the recombinant VSV vector from the cells.

[0347] A method of producing an adaptive mutant of the recombinant VSV particle of the present disclosure is provided. The term “adaptive mutation” used herein refers to a process that produces mutations in a virus or viral particle in response to one or more nonlethal selections and the resulting adaptive mutant virus or viral particle may have an improved biological property (e.g., replication capacity). For example, one or more mutations in a recombinant VSV particle (e.g., VSVΔG-SARS-CoV-2 chimera) may occur due to a change in one or more environmental factors (e.g., temperature, host cells and culture medium), which may reduce replication capacity of the recombinant VSV particle. The adaptive mutations may include at least one amino acid modified, for example, deleted, inserted, or replaced, and can be detected by conventional technologies. An adaptive mutant of the recombinant VSV may exhibit greater replication capacity than the recombinant VSV by, for example, at least 10%, 20%, 30%, 40%, 50%, 60%, 70%, 80%, 90%, 100%, 150% or 200%.

[0348] The method of producing an adaptive mutant may comprise replicating the recombinant VSV particle in a cell culture, changing a condition of the cell culture, identifying a mutant of the recombinant VSV particle exhibiting a better desirable property than the recombinant VSV particle. As result, an adaptive mutant of the recombinant VSV particle is obtained. The desirable property may be increased immunogenicity, as evidenced by, for example, greater replication capacity and/or increased expression of the SARS-CoV-2 S protein or an immunogenic fragment thereof. The condition may be chosen from of temperature, culture medium and cell substrates. For example, the temperature of the cell culture may be changed from a range of 30-36° C. to a range of 38-40° C. The culture medium may be changed from complete medium containing 10% fetal bovine serum to complete medium containing lower quantities of serum like 2% or to alternative mediums like serum-free growth medium. Where the desirable property is replication capacity, the adaptive mutant may exhibit at least 10%, 20%, 30%, 40%, 50%, 60%, 70%, 80%, 90%, 100%, 150% or 200% greater replication capacity than the recombinant VSV particle. The adaptive method may further comprise subjecting the recombinant VSV particle to mutagenesis prior to growing the recombinant VSV particle in the cell culture. The mutagenesis may be chemical.

### VI. Recombinant Cells

[0349] In many embodiments, a recombinant cell comprises a recombinant VSV vector and/or a recombinant VSV particle. In some embodiments, the recombinant cell produces a recombinant VSV particle. A SARS-CoV-2 S protein or a variant thereof is expressed on the surface of the recombinant VSV particle. Cells that may be used as recombinant cells are chosen from Vero cells, human 293 cells, MRC-5 cells, Vero E6 cells, Huh7 cells, DBT cells, Calu-3 2B4 cells, and primary human airway epithelial cells. In many embodiments, the recombinant cell is a Vero cell.

### VII. Methods of Generating an Immune Response Against SARS-CoV-2

[0350] In many embodiments, an effective amount of a recombinant VSV vector, recombinant VSV particle, immunogenic recombinant protein, or SARS-CoV-2 vaccine of the present disclosure is administered in vivo, for example, to produce an immune response in a subject. The recombinant VSV vector, recombinant VSV particle, immunogenic recombinant protein, or SARS-CoV-2 vaccine may be used as one or more components of a prophylactic or therapeutic vaccine against SARS-CoV-2 for the prevention, amelioration or treatment of COVID-19. The term “immune response” used herein refers to any immune response, including but not limited to a humoral response, a cellular antigen-specific immune response, or a combination thereof. A “subject” in the context of the present disclosure may be any animal, for example, a human. In some embodiments the subject is a human, for example, a human that is infected with, or is at risk of infection with, SARS-CoV-2.

[0351] In some embodiments, the immune response may block infection by SARS-CoV-2 of a subject administered the SARS-CoV-2 S protein or an immunogenic variant thereof by, for example, 10%, 20%, 30%, 40%, 50%, 60%, 70%, 80%, 90%, 95%, 99% or 100%, as compared with that of a control subject not administered the SARS-CoV-2 S protein or an immunogenic variant thereof. Generation of an immune response includes both immune responses generated after one dose, as well as immune responses generated after two or more doses. Thus, an immune response may occur after administration of a first vaccine or a first vaccine and a second vaccine.

[0352] Methods of generating an immune response against SARS-CoV-2 may comprise (1) administering to the subject an effective amount of the VSV vector, recombinant VSV particle, immunogenic recombinant protein, or SARS-CoV-2 vaccine of the present disclosure; and (2) generating an immune response to SARS-CoV-2. In some embodiments, the immune response is generated in the subject without causing a disease or symptom associated with the SARS-CoV-2 and the subject is vaccinated. A disease or symptom associated with the SARS-CoV-2 may be fever, cough, shortness of breath, or gastrointestinal symptoms.

[0353] The immune response may comprise a humoral response, a cellular antigen-specific immune response or a combination thereof. Anti-SARS-CoV-2 antibodies may be isolated from a COVID-19 or produced by immunizing a subject with a SARS-CoV-2 epitope. Where the immune response comprises production of antibodies by the subject that block SARS-CoV-2 infection, the methods may further comprise harvesting the antibodies from the vaccinated subject, and optionally mixing the harvested antibodies with a pharmaceutically acceptable excipient to make a pharmaceutical composition. In some embodiments, the antibodies are in the form of immune serum obtained from the vaccinated subject. The antibodies may be in the form of immune serum obtained from vaccinated subjects or monoclonal antibodies prepared from SARS-CoV-2-specific B cells obtained from vaccinated subject.

[0354] When provided prophylactically, the VSV vector, recombinant VSV particle, immunogenic recombinant protein, or SARS-CoV-2 vaccine of the present disclosure are ideally administered to a subject in advance of SARS-CoV-2 infection or evidence of SARS-CoV-2 infection, or in advance of any symptom due to COVID-19, including high-risk subjects. The prophylactic administration of the VSV vector, recombinant VSV particle, immunogenic recombinant protein, or SARS-CoV-2 vaccine can serve to provide protective immunity of a subject against SARS-CoV-2 infection or to prevent or attenuate the progression of COVID-19 in a subject already infected with SARS-CoV-2.

[0355] When provided therapeutically (i.e., after the subject is exposed to SARS-CoV-2 and either before or after the onset of symptoms), the VSV vector, recombinant VSV particle, immunogenic recombinant protein, or SARS-CoV-2 vaccine can serve to ameliorate and treat COVID-19 symptoms and are advantageously used as soon after infection as possible. In some embodiments, the VSV vector, recombinant VSV particle, immunogenic recombinant protein, or SARS-CoV-2 vaccine are provided before appearance of any symptoms of COVID-19 but may also be used at (or after) the onset of the disease symptoms. In some embodiments, the method further comprises preventing or inhibiting binding of SARS-CoV-2 to the receptor. In some embodiments, the receptor is angiotensin-converting enzyme 2 (ACE2).

[0356] In some embodiments, the methods may comprise administering the VSV vector, recombinant VSV particle, immunogenic recombinant protein, or SARS-CoV-2 vaccine to a tissue in the subject that expresses a receptor for SARS-CoV-2, that may comprise ACE2. These methods may prevent or inhibit SARS-CoV-2 from binding to the receptor after the subject is exposed to the SARS-CoV-2. The target tissue may be in the gastrointestinal tract, such as the small intestine, of the subject.

[0357] A. Methods of Administration

[0358] Any suitable method may be used to administer the VSV vector, recombinant VSV particle, immunogenic recombinant protein, or SARS-CoV-2 vaccine, including but not limited to for oral (including oral mucosal, buccal, and/or gastrointestinal) sublingual, intramuscular, intradermal, subcutaneous, intranasal (including nasal mucosal), intraocular, rectal, transdermal, mucosal, topical, intravenous, or parenteral delivery methods. Other delivery methods of DNA to animal tissue have been achieved by cationic liposomes (Watanabe et al., (1994) Mol. Reprod. Dev. 38:268-274; and WO 96/20013), direct injection of naked DNA into animal muscle tissue (Robinson et al., (1993) Vaccine 11:957-960; Hoffman et al., (1994) Vaccine 12: 1529-1533; Xiang et al., (1994) Virology 199: 132-140; Webster et al., (1994) Vaccine 12: 1495-1498; Davis et al., (1994) Vaccine 12: 1503-1509; and Davis et al., (1993) Hum. Mol. Gen. 2: 1847-1851), or intradermal injection of DNA using “gene gun” technology (Johnston et al., (1994) Meth. Cell Biol. 43:353-365). Alternatively, delivery routes can be oral, intranasal or by any other suitable route. Delivery also be accomplished via a mucosal surface such as the anal, vaginal, or oral mucosa.

[0359] In some embodiments, the VSV vector, recombinant VSV particle, immunogenic recombinant protein, or SARS-CoV-2 vaccine is administered orally or oral mucosally. Oral or oral mucosal administration of the vaccine would greatly simplify the production, formulation, packaging and delivery of the vaccine and thus greatly facilitate the implementation and reach of vaccination programs worldwide. Notably, this method can simplify mass vaccination by allowing use of needle-free devices. In addition, the vaccine compositions of the present disclosure administered mucosally require less extensive purification simplifying vaccine manufacturing. Lastly, mucosal vaccine composition of the present disclosure is known to stimulate greater protective immunity at mucosal barriers where most infectious pathogens gains access to the host. Accordingly, one embodiment of the present disclosure is a vaccine composition that is suitable for oral or oral mucosal vaccination. Oral or oral mucosal administration of this vaccine is supported by the high-level expression of ACE2 and Furin (which facilitate viral infection) at mucosal surfaces including those of the oropharyngeal cavity. In yet another embodiment, the VSV vector, recombinant VSV particle, immunogenic recombinant protein, or SARS-CoV-2 vaccine is administered orally or oral mucosally so that may target gastrointestinal mucosa.

[0360] In some embodiments, the VSV vector, recombinant VSV particle, immunogenic recombinant protein, or SARS-CoV-2 vaccine is formulated for oral administration. In some embodiments, the VSV vector, recombinant VSV particle, immunogenic recombinant protein, or SARS-CoV-2 vaccine is formulated for intranasal administration. In some embodiments, the VSV vector, recombinant VSV particle, immunogenic recombinant protein, or SARS-CoV-2 vaccine formulated for oral mucosal administration and intranasal administration combined (a dual route of administration).

[0361] In some embodiments, administering the recombinant VSV vector, recombinant VSV particle, immunogenic recombinant protein, or SARS-CoV-2 vaccine comprises intranasal administration. In some embodiments, administering the recombinant VSV vector, recombinant VSV particle, immunogenic recombinant protein, or SARS-CoV-2 vaccine comprises oral administration. In some embodiments, administering the recombinant VSV vector, recombinant VSV particle, immunogenic recombinant protein, or SARS-CoV-2 vaccine comprises oral mucosal and intranasal administration combined (a dual route of administration).

[0362] B. Subjects

[0363] The subject may be a male or female. The subject may be of all ages. The subject may be younger than 10, 10 or older than 10, 20, 30, 40, 50, 60, 70 or 80 years old. The subject may be 0-10, 10-20, 20-30, 30-40, 40-50, 50-60, 60-70, 70-80, 80-90 or 90-100 years old. The subject may have a pre-existing medical condition, including without limitation, serious chronic medical condition. The pre-existing medical condition may be chosen from asthma, blood or bone marrow transplant, cancer, cardiomyopathy, cerebrovascular disease, chronic kidney disease, chronic obstructive pulmonary disease, coronary artery disease, cystic fibrosis, diabetes (including type 1 diabetes mellitus and type 2 diabetes mellitus), heart disease, heart failure, HIV, hypertension (high blood pressure), immune deficiency, immunocompromised state from solid organ transplant, liver disease, lung disease, neurologic conditions, obesity, pregnancy, pulmonary fibrosis, sickle cell disease, smoking, thalassemia, use of corticosteroids, use of immune weakening medicines, and combinations thereof.

[0364] C. Immunization Doses, Schedules and Regimens

[0365] In some embodiments, a recombinant VSV vector, recombinant VSV particle, immunogenic recombinant protein, or SARS-CoV-2 vaccine is provided in an effective amount for inducing an immune response in a subject wherein at least one dose is administered. In some embodiments, a vaccine comprises a recombinant VSV vector, recombinant VSV particle, or immunogenic recombinant protein in an effective amount for inducing an immune response against the SARS-CoV-2 S protein in a subject wherein at least one dose is administered.

[0366] As used herein, the term “dose” means a quantity (of, for example, a VSV vector, recombinant VSV particle, immunogenic recombinant protein, or SARS-CoV-2 vaccine) taken or recommended to be taken at a particular time. As used herein, the term “single dose” refers requiring only one administration to induce an immune response. As used herein, the term “multiple doses” refers requiring more than one dose to induce an immune response. In some embodiments, the dose or doses provide protection from disease. Suitable doses may be selected based on studies on safety, tolerability, immunogenicity, animal challenge, dose-response, and/or literature-based modeling.

[0367] While dose can vary depending on the route of administration and the size of the subject, suitable doses can be determined by those of skill in the art, for example, by measuring the immune response of a subject, such as a laboratory animal, using conventional immunological techniques, and adjusting the dosages as appropriate. Such techniques for measuring the immune response of the subject include but are not limited to, chromium release assays, tetramer binding assays, IFN-γ ELISPOT assays, IL-2 ELISPOT assays, intracellular cytokine assays, and other immunological detection assays, e.g., as detailed in the text “Antibodies: A Laboratory Manual” by Ed Harlow and David Lane.

[0368] In some embodiments, a dose may comprise an effective amount in the range of 1×10³ to 1×10⁹ plaque forming units as measured by standard methods. One example of an effective amount could include approximately 1×10⁴, 1×10⁵, 1×10⁶, 1×10⁷, or 1×10⁸ plaque-forming units.

[0369] In some embodiments, dose levels for a recombinant VSV vector, recombinant VSV particle, immunogenic recombinant protein, or SARS-CoV-2 vaccine may range from 1.0×10⁶ to 3.8×10⁸ plaque forming units. In some embodiments, a lowest dose level for a recombinant VSV vector, recombinant VSV particle, immunogenic recombinant protein, or SARS-CoV-2 vaccine (which may comprise rVSVΔG-SARS-CoV-2 clone MB1 or rVSVΔG-SARS-CoV-2 clone MB2) is 1.0×10⁶. In some embodiments, a lower middle dose level for a recombinant VSV vector, recombinant VSV particle, immunogenic recombinant protein, or SARS-CoV-2 vaccine (which may comprise rVSVΔG-SARS-CoV-2 clone MB1 or rVSVΔG-SARS-CoV-2 clone MB2) is 3.8×10⁶. In some embodiments, an upper middle dose level for a recombinant VSV vector, recombinant VSV particle, immunogenic recombinant protein, or SARS-CoV-2 vaccine (which may comprise rVSVΔG-SARS-CoV-2 clone MB1 or rVSVΔG-SARS-CoV-2 clone MB2) is 1.5×10⁷. In some embodiments, a higher dose level for a recombinant VSV vector, recombinant VSV particle, immunogenic recombinant protein, or SARS-CoV-2 vaccine (which may comprise rVSVΔG-SARS-CoV-2 clone MB1) is 5.6×10⁷. In some embodiments, a highest dose level for a recombinant VSV vector, recombinant VSV particle, immunogenic recombinant protein, or SARS-CoV-2 vaccine (which may comprise rVSVΔG-SARS-CoV-2 clone MB1) is 3.8×10⁸.

[0370] In some embodiments, dose levels for a recombinant VSV vector, recombinant VSV particle, immunogenic recombinant protein, or SARS-CoV-2 vaccine (which may comprise rVSVΔG-SARS-CoV-2 clone MB1 or rVSVΔG-SARS-CoV-2 clone MB2) may range from 1.0×10⁶ to 3.8×10⁸, from 1.0×10⁶ to 5.0×10⁷, or from 2.0×10⁶ to 2.0×10⁷ plaque forming units.

[0371] In some embodiments, dose levels for a recombinant VSV vector, recombinant VSV particle, immunogenic recombinant protein, or SARS-CoV-2 vaccine (which may comprise rVSVΔG-SARS-CoV-2 clone MB1 or rVSVΔG-SARS-CoV-2 clone MB2) may range from 1.0×10⁶ to 3.8×10⁶ plaque forming units. In some embodiments, dose levels for a recombinant VSV vector, recombinant VSV particle, immunogenic recombinant protein, or SARS-CoV-2 vaccine (which may comprise rVSVΔG-SARS-CoV-2 clone MB1 or rVSVΔG-SARS-CoV-2 clone MB2) may range from 3.8×10⁶ to 1.5×10⁷ plaque forming units. In some embodiments, dose levels for a recombinant VSV vector, recombinant VSV particle, immunogenic recombinant protein, or SARS-CoV-2 vaccine (which may comprise rVSVΔG-SARS-CoV-2 clone MB1 or rVSVΔG-SARS-CoV-2 clone MB2) may range from 1.5×10⁷ to 5.6×10⁷ plaque forming units. In some embodiments, dose levels for a recombinant VSV vector, recombinant VSV particle, immunogenic recombinant protein, or SARS-CoV-2 vaccine (which may comprise rVSVΔG-SARS-CoV-2 clone MB1) may range from 5.6×10⁷ to 3.8×10⁸ plaque forming units.

[0372] In some embodiments, a dose level for a recombinant VSV vector, recombinant VSV particle, immunogenic recombinant protein, or SARS-CoV-2 vaccine is chosen from 5.0×10⁵, 2.4×10⁶, 1.15×10⁷, and 5.55×10⁷ plaque forming units.

[0373] The recombinant VSV vector, recombinant VSV particle, immunogenic recombinant protein, or SARS-CoV-2 vaccine may be administered in a single dose, in two doses, or in multiple doses. The immunization regimes may comprise 1 to 6 doses, but may have as few as one or 2 or 4. Two or multiple doses may be administered sequentially with days, weeks, months or years apart. In some embodiments, a set time interval between doses may range from 10 days to several weeks, and may be 2, 4, 6 or 8 weeks. For example, two doses may be administered at approximately 1, 2, 3, 4 weeks, 1, 2, 3, 4, 5, 6, 7, 8, 9, 10, 11 or 12 months, 1, 2, 3, 4, 5, 6, 7, 8, 9 or 10 years apart. For humans, the interval is typically from 2 to 6 weeks.

[0374] The first dose may be for a priming immunization and the second dose or follow-up dose(s) may be a boosting immunization. Each dose shall have an effective amount of the VSV vector, recombinant VSV particle, immunogenic recombinant protein, or SARS-CoV-2 vaccine as described herein.

[0375] Immunizations can also include administration of an adjuvant with the VSV vector, recombinant VSV particle, immunogenic recombinant protein, or SARS-CoV-2 vaccine. In some embodiments, the methods comprise annual, biannual or other long interval (e.g., 5-10 years) booster immunizations which serve to supplement the initial immunization protocol.

[0376] Immunizations may include a variety of prime-boost regimens, for example, DNA prime-Adenovirus boost regimens. In many embodiments, one or more priming immunizations are followed by one or more boosting immunizations. The vaccine or pharmaceutical composition can be the same or different for each immunization and the type of immunogenic composition (e.g., containing recombinant VSV vector, recombinant VSV particle, immunogenic recombinant protein, or SARS-CoV-2 vaccine), the route, and formulation of the immunogens can also be varied. For example, if an expression vector is used for the priming and boosting steps, it can either be of the same or different type (e.g., DNA or bacterial or viral expression vector). One useful prime-boost regimen provides for two priming immunizations, four weeks apart, followed by two boosting immunizations at 4 and 8 weeks after the last priming immunization. It should also be readily apparent to one of skill in the art that there are several permutations and combinations that are encompassed using the DNA, bacterial and viral expression vectors of the disclosure to provide priming and boosting regimens.

[0377] In some embodiments, at least one priming dose is administered and at least one boosting dose is administered, wherein the doses can be the same or different, provided that at least one of the doses comprises recombinant VSV vector, recombinant VSV particle, immunogenic recombinant protein, or SARS-CoV-2 vaccine, and wherein a sufficient amount was administered in each dose to induce a SARS-CoV-2-specific immune response in the subject. The SARS-CoV-2-specific immune response can include a SARS-CoV-2-specific T-cell immune response or a SARS-CoV-2-specific B-cell immune response. In some embodiments, the immunizations can be done at intervals, such as at least 0-29 or more weeks.

[0378] In instances where at least a portion of the VSV-G protein is retained, the prime-boost regimen can also include VSV vectors that derive their G protein from different serotype vesicular stomatitis viruses (Rose N F, Roberts A, Buonocore L, Rose J K. Glycoprotein exchange vectors based on vesicular stomatitis virus allow effective boosting and generation of neutralizing antibodies to a primary isolate of human immunodeficiency virus type 1. J Virol. 2000 December; 74(23):10903-10). The VSV vectors used in these examples contain a G protein derived from the Indiana serotype of VSV. Vectors can also be constructed to express epitopes in the context of G molecules derived from other VSV serotypes (i.e. vesicular stomatitis New Jersey virus or vesicular stomatitis Alagoas virus) or other vesiculoviruses (i.e. Chandipura virus, Cocal virus, Isfahan virus).

[0379] The recombinant VSV vector, recombinant VSV particle, immunogenic recombinant protein, or SARS-CoV-2 vaccine can be administered alone, or can be co-administered, or sequentially administered, with other SARS-CoV-2 immunogens and/or SARS-CoV-2 immunogenic compositions, e.g., with “other” immunogenic, antigenic or vaccine or therapeutic compositions thereby providing multivalent or “cocktail” or combination compositions of the disclosure and methods of employing them. Again, the ingredients and manner (sequential or co-administration) of administration, as well as dosages can be determined taking into consideration such factors as the age, sex, weight, species and condition of the particular subject, and the route of administration.

### EXAMPLES

### Example 1. VSVΔG-SARS-CoV-2 Genomic Clones

[0380] VSVΔG-SARS-CoV-2 (also referred to as rVSVΔG-SARS-CoV-2) genomic clones have been generated by replacing VSV-G gene in VSV with a nucleotide sequence encoding wild-type SARS-CoV-2 S protein or a variation thereof. The resulting VSVΔG-SARS-CoV-2 chimeric viruses exhibited substantially diminished replicative capacity. To obtain replication-competent VSVΔG-SARS-CoV-2 chimeric viruses, adaptive mutants having rescued replicative capacity were obtained by infecting cells with the VSVΔG-SARS-CoV-2 chimeric viruses. The replication-competent VSVΔG-SARS-CoV-2 clone isolates have been found to contain novel mutations in the SARS-CoV-2 S protein and used to select two vaccine candidates: rVSVΔG-SARS-CoV-2 clones MB1 and MB2.

[0381] A gene encoding a wild-type SARS-CoV-2 S protein or a variant thereof was cloned into the rVSV genetic background as described by Lawson et al. (PNAS 92, 4477-4481 (1995)) used for development of the rVSVΔG-ZEBOV-GP chimera as described by Garbutt et al. (J Virol 78, 5458-5465 (2004)) and Jones et al. (Nature medicine 11, 786-790 (2005)) (FIG. 4).

[0382] The nucleotide sequence for the SARS-CoV-2 S protein, wild-type or a variant thereof (FIG. 5), was synthesized at GenScript, Inc. and cloned into a VSV genomic plasmid in the position normally occupied by the VSV-G gene. The nucleotide sequences of the resulting VSVΔG-SARS-CoV-2 genomic clones were confirmed prior to their use for virus rescue.

[0383] For example, the wild-type SARS-CoV-2 S protein sequence was from SARS-CoV-2 isolate USA-WA1 (accession number MN985325). The resulting VSVΔG-SARS-CoV-2 genomic clone, Construct 1 with wild-type S protein, was successfully used in cell culture to rescue replication-competent rVSVΔG-SARS-CoV-2 having adaptive mutations in the SARS-CoV-2 S protein.

### Example 2. Cell Culture

[0384] Vero cells (WHO 10-87) were used to cultivate VSVΔG-SARS-CoV-2 vectors as described in this application. The Vero Working Cell Bank (WCB Lot 117-10004) was produced under GMP conditions at our manufacturer, SAFC Pharma (Carlsbad, Calif.).

[0385] Vero cells generated from the WCB were cultured in DMEM (#12430-047) supplemented with 10% heat-inactivated Fetal bovine serum (SAFC #12103C) plus 2 mM L-glutamine, 1 mM sodium pyruvate, and 0.1 mM MEM nonessential amino acids (all obtained from Thermo Fisher unless specified). The cells were maintained in incubators at 37° C., 5% CO2 and 85% Humidity.

[0386] The cell density at the time of infection was 1.20E+07 viable cells in T175 flask.

### Example 3. Virus Rescue

[0387] rVSVΔG-SARS-CoV-2 rescue was conducted using Vero cells as illustrated in FIG. 6. In brief, Vero cells were electroporated with one of the rVSVΔG-SARS-CoV-2 genomic clones plus a blend of six ‘supporting’ plasmids that express the five VSV structural proteins needed to initiate the virus replication cycle [nucleoprotein (N); phosphoprotein (P); matrix (M); glycoprotein (G); large protein (L) or viral RNA-dependent RNA polymerase] as well as bacteriophage T7 RNA polymerase (Witko et al., J Virol Methods 135, 91-101 (2006); Rabinovich et al., PLoS ONE 9, e106597 (2014)). Conditions for electroporation with BTX830 apparatus was described by Rabinovich et al. (PLoS ONE 9, e106597 (2014)).

[0388] After electroporation, the cells were plated in the medium of 10% FBS to rest in the incubator at 37° C. with 5% CO₂, 85% Humidity for two hours after which the cultures were subjected to heat shock at 42° C., 5% CO₂ and 85% Humidity for another 2 hours. Following the heat shock, the cells were incubated for three days at 37° C. with 5% CO₂, 85% humidity.

### Example 4. Serial Passages in Vero Cells to Derive a Recombinant Virus that Propagates to Higher Titers

[0389] Rescue of rVSVΔG-SARS-CoV-2 virus is challenging because growth of a virus expressing an exogenous S protein is substantially attenuated. To overcome this barrier, supernatant collected from a rescue flask containing the rVSVΔG-SARS-CoV-2 virus was passaged one time on the Vero cells transiently expressing VSV-G to enhance the initial growth of recombinant virus. Following this first round of virus amplification, the recombinant virus was passaged additional times in Vero cell monolayers without providing VSV-G complementation. As mentioned above, adaptation by serial passage allows isolation of a genetically stable virus with improved growth characteristics (FIGS. 7, 8 and 14).

[0390] Vero cell propagation and infection were conducted using growth medium containing 10% FBS. Following the additional serial passages described above, virus harvest in the medium was used for clonal isolation by plaque purification. All samples are characterized by assays listed on Table 2.

TABLE 2
Characterization Assays

| | |
|---|---|
| 1 | Infectivity titer on Vero cells by plaque assay |
| 2 | Whole genome sequence determined by Sanger Sequencing |
| 3 | S glycoprotein expression by Western blot |
| 4 | Modeling of sequence variants on SARS-CoV-2 S protein structure |
| 5 | SARS-CoV-2 pseudoneutralization (PRNT) assay |
| 6 | hACE2-human cell line infectivity assay |
| 7 | Ig-ACE2 flow virometry |

### Example 5. Plaque Purification and Characterization

[0391] Plaque purification was executed by picking multiple well-isolated plaques after which each plaque was amplified in T-25 flasks to generate virus stocks. Each plaque isolate was then analyzed by the characterization assays described in Table 2.

[0392] Plaque isolation was performed using two related procedures. In the first procedure, plaques were picked from monolayers cultured in growth medium supplemented with FBS after which the virus was amplified in the presence of serum. In the second procedure, the Vero cell monolayer was cultured in serum-free medium (VP-SFM). rVSVΔG-SARS-CoV-2 clone MB1 (nucleic acid sequence SEQ ID NO: 150 or amino acid sequences SEQ ID NOS: 151-153, 155, and 156) is a virus clone isolated using VP-SFM. rVSVΔG-SARS-CoV-2 clone MB2 (nucleic acid sequence SEQ ID NO: 154 or amino acid sequences SEQ ID NOS: 152, 155-158) is a virus clone prepared using medium supplemented with FBS (described in Example 7 below).

### Example 6. Amplification of rVSVΔG-SARS-CoV-2 Clones MB1 and MB2 to Generate Two Leading Vaccine Candidates

[0393] Two clone isolates, rVSVΔG-SARS-CoV-2 clone MB1 (nucleic acid SEQ ID NO: 150 or amino acid sequences SEQ ID NOS: 151-153, 155, and 156) and rVSVΔG-SARS-CoV-2 clone MB2 (nucleic acid SEQ ID NO: 154 or amino acid sequences SEQ ID NOS: 152 and 155-158), were selected as vaccine candidates. Expansion of these two clone isolates was conducted using Vero cells cultured in VP-SFM. Both pre-master virus seed (pre-MVS) vaccine candidates were passaged in Vero cells to ensure no further genomic changes occurred during subsequent processing. rVSVΔG-SARS-CoV-2 clone MB1 was passaged an additional five passages. rVSVΔG-SARS-CoV-2 clone MB2 was passaged an additional three passages. rVSVΔG-SARS-CoV-2 clone MB1 was prioritized for GMP manufacturing of the Master Virus Seed (MVS) (FIGS. 12 and 13A-B).

### Example 7. Virus Infectivity Titers Measured by Plaque Assay

[0394] We set out to identify at least one clone that provided a high virus titer by testing over 44 clone isolates for infectivity. A higher titer will enable higher doses, which may enable better infectivity and a more robust immune response in a subject. Virus infectivity titers of clone isolates were measured over time after cell infection by a standard immunoplaque assay. The clones were isolated and grown at serum-containing medium or in serum-free medium. Pre-master seed viral stocks were generated for each clone. Vero cells were used to provide data that will support vaccine manufacturing. Ten-fold dilutions of the viral stock were prepared using 2% FBS as diluent and 0.5 mL of the serial dilution was inoculated on the Vero cell monolayer in each well of 6-well plate. After one-hour incubation, the inoculums were removed, and the Vero cells were overlayed with 0.8% Agarose plus 2% FBS. Plaques became visible from 24 to 72 hours post infection. Cells were then fixed with 7% formaldehyde adding on top of the agarose for 30 minutes. After the cells were fixed, the agarose overlays were removed to allow the monolayer to be stained by Crystal violet. The infectivity titers were expressed as plaque-forming units per ml (PFU/mL) and calculated by the average of at least two replicates. Using this first method, we measured infectivity over time for Construct 1 (rescued using a plasmid encoding the wild-type S protein); infectivity titers improved from 4.00E+05 pfu/mL to 2.00E+07 PFU/mL with increasing rounds of passaging (FIG. 7).

[0395] A second method was also used to measure infectivity titers. Vero cells were plated, incubated at 37±1° C. and 5±1% CO₂, and later checked for confluency. A dilution box was prepared as shown in Table 3. Samples were thawed at ambient temperature in a Biosafety Cabinet and the positive control was thawed at 37±1° C. in a water bath. Samples and the positive control were diluted according to Table 3.

TABLE 3
Dilution Box Set-Up for Drug Substance and PC Sample

| Dilutions | Dilution Scheme |
|---|---|
| 1^{st} Dilution | 1:10-900 μL dilution medium + |
| | 100 μL sample |
| 2^{nd} Dilution | 1:100-900 μL dilution medium + |
| | 100 μL previous dilution (10) |
| 3^{rd} Dilution | 1:4000-975 μL dilution medium + |
| | 25 μL previous dilution (100) |
| 4^{th} Dilution | 1:8000-500 μL dilution medium + |
| | 500 μL previous dilution (4K) |
| 5^{th} Dilution | 1:16000-500 μL dilution medium + |
| | 500 μL previous dilution (8K) |
| 6^{th} Dilution | 1:32000-500 μL dilution medium + |
| | 500 μL previous dilution (16K) |

[0396] Plates of Vero cells were removed from the 37±1° C., 5+1% CO₂ incubator for media removal. Media was removed by gentle decanting. We used an absorbent mat to remove residual media by gently bringing the mat in contact with the plate. To avoid drying the monolayer of Vero cells, the plates of cells were decanted only one at a time. Each well of cells was inoculated with 150 μL of each dilution in the plate. Each plate was rocked ensure that each inoculum covered the entire well. Plates were placed back into the 37±1° C., 5±1% CO₂ incubator for approximately 1 hour to allow for attachment. In instances where the number of plates being assayed is very large, the plates were assayed in batches. During the attachment time period, plates were rocked manually at 30±5 minute intervals to ensure even distribution of the samples in the wells and to prevent the cells from drying out.

[0397] After the 1 hour attachment time period, the plates were removed from the incubator and 1 mL of overlay was added to each well. Plates were handled very gently and with caution to avoid disturbing the monolayer of Vero cells, such as touching pipet tips of the multichannel pipet to the side of each well while pipetting so as to avoid unnecessary turbulence. The plates were left to cool in the Biosafety Cabinet for 15 to 30 minutes or until the overlay had firmed. After that, the plates were placed back in the incubator for 24±1 hours until staining.

[0398] For staining, plates were removed from the incubator and 200 μL of formalin was added to each well. The cells were incubated with formalin at room temperature for 60±10 minutes. The wells were decanted by gently inverting the plates and tapping to remove plugs. 200 μL of 1% crystal violet solution was applied to each well. After 3 to 5 minutes, the plates were submerged in water for rinsing. The plates were submerged three times or more times, until we observed no more stain coming off in the rinse. The plates were then placed on absorbent pads and left to dry at ambient temperature. The plaques were then counted to determine titer. The titer for each clone is shown in Table 4.

TABLE 4
Titers from Immunoplaque (Infectivity) Assay

| Source | Clone | Geomean Infectious Titer |
|---|---|---|
| Round 1 | 1 | 1.6E+06 |
| | 2 | 1.5E+06 |
| | 3 | 1.6E+06 |
| | 4 | 1.9E+06 |
| | 5 | 2.0E+06 |
| | 6 | 2.1E+06 |
| | 7 | 1.5E+06 |
| | 8 | 1.9E+06 |
| | 9 | 2.1E+06 |
| | 10 | 2.3E+06 |
| | 11 | 2.1E+06 |
| | 12 | 1.9E+06 |
| | 13 | 2.4E+06 |
| | 14 | 2.4E+06 |
| | 15 | 2.0E+06 |
| | 16 | 1.3E+06 |
| | 17 | 2.2E+06 |
| | 18 | 2.1E+06 |
| | 19 | 2.0E+06 |
| | 20 | 1.7E+06 |
| Plaque isolates | SC1 | 4.5E+05 |
| from serum- | SC3 | 4.3E+05 |
| containing | SC7 | 2.7E+05 |
| medium | MB2 | 1.6E+05 |
| Plaque isolates | SF1 | 7.4E+04 |
| from serum-free | SF2 | 3.24E+03 |
| medium | SF3 | 4.95E+05 |
| | SF4 | 1.95E+03 |
| | SF5 | 3.25E+04 |
| | SF6 | 9.97E+04 |
| | SF7 | 5.80E+04 |
| | SF8 | 6.99E+03 |
| | SF9 | 1.4E+04 |
| | SF10 | 2.85E+04 |
| | SF11 | 1.05E+06 |
| | SF12 | 3.91E+05 |
| | SF13 | 3.58E+05 |
| | SF14 | 1.42E+05 |
| | SF15 | 1.26E+05 |
| | SF16 | 1.51E+05 |
| | SF17 | 9.62E+03 |
| | SF18 | 8.51E+04 |
| | SF19 | 5.51E+04 |
| | MB1 | 1.80E+06 |

[0399] We then measured infectivity over time for clones SC1, SC3, SC7, and MB2 from the serum-containing medium and clone MB1 from the serum-free medium. PFU/mL for clones SC1, SC3, SC7, and MB2 at 53 and 67 hours are shown in FIG. 11. PFU/mL for clones MB1 and MB2 at 28, 42, 54, 65, and 72 hours are shown in FIG. 12. All five clones also showed improved infectivity titers over time (FIGS. 11 and 12).

### Example 8. Whole Genome Sequencing

[0400] A. Materials and methods

[0401] We set out to determine the purity and stability of each clone, which included determining that there were no changes to attenuating mutations in VSV. The whole genome of virus clone isolates were sequenced.

[0402] The Sanger sequencing method was used to determine the nucleotide sequences of the clone isolates. Viral RNA of each clone isolate was isolated by RNA extraction kit from Qiagen (#52906). One-step RT-PCR (SuperScript III) reactions were conducted to reverse transcribe and amplify the cDNAs cross the VSV genome. Eight overlapping cDNA fragments were generated to cover the 14 kb RNA genome. Each cDNA was 2 to 3 kb in length for further Sanger sequencing. Data was analyzed using DNASTAR SeqMan Pro, MegAlign, Vector NTi and ABI Seq Scanner2. Table 5 lists the primers used for sequencing the eight overlapping cDNA fragments in RT-PCR reactions N, P, M, S1, S2, L1, L2 and L3. Table 6 lists the primers used for the Sanger sequencing of the whole genome of rVSVΔG-SARS-CoV-2 clone isolates.

TABLE 5
List of Primers for One-step RT-PCR

| RT-PCR reaction name | Forward primer name | Reverse primer name | Expected Size(kb) |
|---|---|---|---|
| N | 1gVSVLeader_f | 10gVSV_1600r | 1.7 |
| P | 11gVSV_1200f | 18gVSV_2400r | 1.3 |
| M | 19gVSV_2000f | 24CoV_S_rvs1 | 1.1 |
| S1 | 25gVSV_2400f | 36CoV_S_rvs6 | 2.5 |
| S2 | 37CoV_S_fw5 | 49gVSV_4800r | 2.5 |
| L1 | 50CoV_S_fw10 | 59gVSV_6200r | 2.7 |
| L2 | 60gVSV_6300f | 70gVSV_8200r | 3.0 |
| L3 | 71gVSV_8300f | 82JRVSVTrailer_r | 3.0 |

TABLE 6
List of Primers Used for the Sanger
Sequencing of the rVSVΔG-SARS-CoV-2 Genome

| | | SEQ |
|---|---|---|
| Primer name | Sequence | ID NO: |
| 1gVSVLeader_f | ACGAAGACAAACAAACCATT | 68 |
| | ATTATCATTAAAAGG | |
| 2gVSV_400f | AGCAGGGGATACAATCGGAA | 69 |
| | TA | |
| 3gVSV_800f | CACCTCTGCAAAATAACCGG | 70 |
| | AA | |
| 4gVSV_1200f | GCAGAGATGTGGTCGAATGG | 71 |
| | C | |
| 5gVSV_1600f | TGAAGGCTTTATACAGGGGC | 72 |
| 6gVSV_200r | TGGTAGACATATCCTCTTAG | 73 |
| 7gVSV_400r | GCTGGTTCTGGAAGCATCCG | 74 |
| 8gVSV_800r | CTGGAAGCATCATTTGGACC | 75 |
| | ATTT | |
| 9gVSV_1200r | GCTCTTTTCGCATACTGCAT | 76 |
| | CATA | |
| 10gVSV_1600r | CCACTTCCTCATCTGCATAG | 77 |
| | TCAT | |
| 11gVSV_1200f | GCAGAGATGTGGTCGAATGG | 78 |
| | C | |
| 12gVSV_1600f | TGAAGGCTTTATACAGGGGC | 79 |
| 13gVSV_2000f | TCCATGACTTTCCAACCCAA | 80 |
| | GA | |
| 14gVSV_2400f | CGAGATGGACACCTATGATC | 81 |
| | CGAA | |
| 15gVSV_1200r | GCTCTTTTCGCATACTGCAT | 82 |
| | CATA | |
| 16gVSV_1600r | CCACTTCCTCATCTGCATAG | 83 |
| | TCAT | |
| 17gVSV_2000r | CTCCGACAGAGATGAACTCT | 84 |
| | CCTC | |
| 18gVSV_2400r | GCTGCCACATCTGAGTATGT | 85 |
| | TCTG | |
| 19gVSV_2000f | TCCATGACTTTCCAACCCAA | 86 |
| | GA | |
| 20gVSV_2400f | CGAGATGGACACCTATGATC | 87 |
| | CGAA | |
| 21gVSV_2800f2 | CTACGATGATGAGTCACTGG | 88 |
| 22gVSV_2400r | GCTGCCACATCTGAGTATGT | 89 |
| | TCTG | |
| 23gVSV_2800r | CCTTTTTCTCGACAATCAGG | 90 |
| | CC | |
| 24CoV_S_rvs1 | CTCTTTGTTCCATTGGTTCC | 91 |
| 25gVSV_2400f | CGAGATGGACACCTATGATC | 92 |
| | CGAA | |
| 26CoV_S_fw1 | AGTGGATCCTACTCGAGAGG | 93 |
| 27CoV_S_fw2 | CATTAAAGTCTGTGAATTCC | 94 |
| 28CoV_S_fw3 | AGCAGCTGCTTACTATGTTG | 95 |
| 29CoV_S_fw4 | GTATATGCAGATTCCTTTGT | 96 |
| 30CoV_S_fw5 | ACCTAAGAAGAGCACTAATC | 97 |
| | T | |
| 31CoV_S_rvs1 | CTCTTTGTTCCATTGGTTCC | 98 |
| 32CoV_S_rvs2 | GATCTCTAACTAGGTTTATA | 99 |
| | GGTGT | |
| 33CoV_S_rvs3 | AGTAGCATTGAAAACCTCTC | 100 |
| 34CoV_S_rvs4 | CATTACACGGTGTGCTGCCC | 101 |
| 35CoV_S_rvs5 | GATAGAGAACGGCAACTTGA | 102 |
| 36CoV_S_rvs6 | GGAATCTCCACAGATGTACA | 103 |
| 37CoV_S_fw5 | ACCTAAGAAGAGCACTAATC | 104 |
| | T | |
| 38CoV_S_fw6 | TGACATTCCAATCGGTGCCG | 105 |
| 39CoV_S_fw7 | CCATCAAGGATTTTGGAGGA | 106 |
| | TTTAA | |
| 40CoV_S_fw8 | GCTATAGGAAAGATTCAGGA | 107 |
| 41CoV_S_fw9 | ACATGTAACATATGTGCCCG | 108 |
| 42CoV_S_fw10 | TGATCGACCTTCAGGAGCTG | 109 |
| 43CoV_S_rvs7 | TGTAATTGTACCAGCCAACA | 110 |
| 44CoV_S_rvs8 | TGATGAGTTGTTGGGTGACG | 111 |
| 45CoV_S_rvs9 | GGAATCGAGTTCAGGTTGTA | 112 |
| 46CoV_S_rvs10 | AACGCGTAAACAGCTAGCCT | 113 |
| 47gVSVGene4_f | TTAATGTTTGGCCTGATTGT | 114 |
| | CGAGA | |
| 48gVSVGene4_rev | GCGCTCATCGGGATTCAGGA | 115 |
| | A | |
| 49gVSV_4800r | CCACCACGTCAAATGTTATT | 116 |
| | TC | |
| 50CoV_S_fw10 | ACATGTAACATATGTGCCCG | 117 |
| 51gVSV_5300f | GGGCAACAAACCAATTGAAT | 118 |
| 52gVSV_5800f | GCAAGAGAATCAAGGCCTTT | 119 |
| | AGT | |
| 53gVSV_6300f | CCCATCGATAATATACTCTG | 120 |
| | ACAAA | |
| 54gVSV_6800f | TCCTTAATCGAGAGAACTCA | 121 |
| | TGAA | |
| 55gVSV_4800r | CCACCACGTCAAATGTTATT | 122 |
| | TC | |
| 56gVSV_5200r2 | ACTAAAGGCCTTGATTCTCT | 123 |
| | TGC | |
| 57gVSV_5200r | GATGGGTCTAGTAAGTCGGG | 124 |
| | TATT | |
| 58gVSV_6200r2 | TTCATGAGTTCTCTCGATTA | 125 |
| | AGGA | |
| 59gVSV_6200r | CACTCGTGACCATCTCTTGG | 126 |
| 60gVSV_6300f | CCCATCGATAATATACTCTG | 127 |
| | ACAAA | |
| 61gVSV_6800f | TCCTTAATCGAGAGAACTCA | 128 |
| | TGAA | |
| 62gVSV_7300f | TGACCAAATACCCACTTGTG | 129 |
| | C | |
| 63gVSV_7800f | CGAACTTGTTAAAGACTGAG | 130 |
| | GTTAA | |
| 64JKgVSV_8300f | CGGGATCCATGACGTCTTTA | 131 |
| 65gVSV_8800f | TTTGAGACCCATAGAAGAGA | 132 |
| | TCAC | |
| 66gVSV_6200r | CACTCGTGACCATCTCTTGG | 133 |
| 67gVSV_7200r2 | TTAACCTCAGTCTTTAACAA | 134 |
| | GTTCG | |
| 68gVSV_7200r | TGAACCCTGATGTGTTACAT | 135 |
| | GG | |
| 69gVSV_8200r2 | GTGATCTCTTCTATGGGTCT | 136 |
| | CAAA | |
| 70gVSV_8200r | TCGTTTCTAATTCGTCTCTA | 137 |
| | ATAGG | |
| 71gVSV_8300f | CGGGATCCATGACGTCTTTA | 138 |
| 72gVSV_8800f | TTTGAGACCCATAGAAGAGA | 139 |
| | TCAC | |
| 73gVSV_9300f | CTCCTATCCGACAAGCAACC | 140 |
| 74gVSV_9800f | GAATCAGGTTGGGCCAATTA | 141 |
| 75gVSV_10300f | GAGCGAAAAGAATGCAGTAA | 142 |
| | CA | |
| 76gVSV_10800f | GCTTTTGGCTGAGTTTGATG | 143 |
| 77JKVSVGene6_f | AAACACAGGAATGATTGAAT | 144 |
| 78gVSV_8200r | TCGTTTCTAATTCGTCTCTA | 145 |
| | ATAGG | |
| 79gVSV_9200r2 | TAATTGGCCCAACCTGATTC | 146 |
| 80gVSV_9200r | CGCTCTCACAAATATATGTT | 147 |
| | CCATA | |
| 81gVSV_10200r2 | CATCAAACTCAGCCAAAAGC | 148 |
| 82JRVSVTrailer_r | ACGAAGACCACAAAACCAGA | 149 |
| | TAAA | |

[0403] The Illumina Next-Generation Sequencing method was also used to determine the nucleotide sequences of the clones. A cDNA library was constructed using the KAPA RNA HyperPrep for Kit Illumina Platforms (Roche KiK8541) with KAPA Unique Dual-Indexed Adapters (Roche KiK8727) as per the manufacturer's instructions. The quality of the library was evaluated with the 4200 TapeStation system (Agilent G2991AA) and concentration determined using the Qubit dsDNA HS Assay Kit (Q32851) on the Qubit Fluorometer. The samples were pooled and sequencing was performed on the Illumina NextSeq 500 Platform using the NextSeq 500/550 High Output v2.5 kit, 300 cycles (2_151 read length). Files were demultiplexed and adapters removed (bclfastq version 2.17.1.4).

[0404] B. Results

[0405] The sequencing results confirmed that (1) there were minimal to no sequence changes in the VSV genes; (2) the clones were pure and there was no contamination; and (3) the sequence variation in each clone was fully penetrant. The sequencing results identified variations from the template genome that was present in each clone. Sequencing results are shown in Table 7.

TABLE 7
Mutations Present in the Sequence of Each Clone

| Source | Clone | Sequence variation |
|---|---|---|
| Round 1 | 1 | CoV2-Swt H655YCoV2-Swt R682KCoV2-Swt S1261*non-coding a6993- VSV-L R201W |
| | 2 | CoV2-Swt H655YCoV2-Swt R682KCoV2-Swt S1261*non-coding g6992GG VSV-L R201W |
| | 3 | CoV2-Swt H655YCoV2-Swt R682KCoV2-Swt S1261*VSV-L R201WVSV-L A326T |
| | 4 | CoV2-Swt H655YCoV2-Swt R682KCoV2-Swt S1261*VSV-L R201W |
| | 5 | CoV2-Swt H655YCoV2-Swt R682KCoV2-Swt S1261*VSV-L R201W |
| | 6 | CoV2-Swt H655YCoV2-Swt R682KCoV2-Swt S1261*VSV-L R201W |
| | 7 | VSV-M A216GCoV2-Swt H655YCoV2-Swt R682KCoV2-Swt S1261*VSV-L |
| | | D28EVSV-L R201WVSV-L Q1986R |
| | 8 | CoV2-Swt H655YCoV2-Swt R682KCoV2-Swt S1261*VSV-L R201WVSV-L A326T |
| | 9 | CoV2-Swt H655YCoV2-Swt R682KCoV2-Swt S1261*VSV-L R201W |
| | 10 | CoV2-Swt H655YCoV2-Swt R682KCoV2-Swt S1261*VSV-L R201W |
| | 11 | CoV2-Swt H655YCoV2-Swt R682KCoV2-Swt S1261*VSV-L R201W |
| | 12 | CoV2-Swt V622ACoV2-Swt H655YCoV2-Swt R682KCoV2-Swt S1261*VSV-L R201W |
| | 13 | CoV2-Swt H655YCoV2-Swt R682KCoV2-Swt S1261*VSV-L R201W |
| | 14 | CoV2-Swt H655YCoV2-Swt R682KCoV2-Swt Silent K933CoV2-Swt S1261*VSV-L R201W |
| | 15 | CoV2-Swt H655YCoV2-Swt R682KCoV2-Swt S1261*VSV-L R201W |
| | 16 | VSV-M A216GCoV2-Swt H655YCoV2-Swt R682KCoV2-Swt S1261*VSV-L R201W |
| | 17 | CoV2-Swt H655YCoV2-Swt R682KCoV2-Swt S1261*VSV-L R201W |
| | 18 | CoV2-Swt H655YCoV2-Swt R682KCoV2-Swt S1261*VSV-L R201W |
| | 19 | CoV2-Swt H655YCoV2-Swt R682KCoV2-Swt S1261*VSV-L R201W |
| | 20 | CoV2-Swt H655YCoV2-Swt R682KCoV2-Swt S1261*VSV-L R201W |
| Plaque | SC1 | non-coding c3058T CoV2-Swt R683GCoV2-Swt G1251* |
| isolates | SC3 | CoV2-Swt H655YCoV2-Swt Silent L864CoV2-Swt G1251*VSV-L K189Qnon-coding |
| from serum- | SC7 | c13439A |
| containing | MB2 | CoV2-Swt H655YCoV2-Swt S1261*VSV-L Silent E2VSV-L T561A |
| medium | | CoV2-Swt H655YCoV2-Swt G1251*VSV-L Silent I1343 |
| Plaque | SF1 | VSV-M E213KCoV2-Swt S1261* |
| isolates | SF2 | VSV-M E213KCoV2-Swt N978KCoV2-Swt S1261* |
| from serum- | SF3 | VSV-P E67DCoV2-Swt H655YCoV2-Swt S940GCoV2-Swt G1251*VSV-L Silent |
| free | | V1701VSV-L N1849D |
| medium | SF4 | non-coding c3058T CoV2-Swt R683GCoV2-Swt G1251* |
| | SF5 | VSV-M A186Snon-coding c3058T CoV2-Swt R683GCoV2-Swt G1251* |
| | SF6 | VSV-M E213KCoV2-Swt N709SCoV2-Swt G1251* |
| | SF7 | VSV-M E213KCoV2-Swt N709SCoV2-Swt G1251*VSV-L Y218HVSV-L Silent |
| | | D1141VSV-L Silent S1734 |
| | SF8 | VSV-M E213KCoV2-Swt N709SCoV2-Swt G1251* |
| | SF9 | VSV-M E213KCoV2-Swt Silent S46CoV2-Swt N709SCoV2-Swt D1163NCoV2-Swt |
| | | G1251*non-coding a6990T VSV-L Silent N58 |
| | SF10 | VSV-P R228KVSV-M G112WSV-M A219Vnon-coding c3058T CoV2-Swt |
| | | R683GCoV2-Swt D1118ACoV2-Swt G1251* |
| | SF11 | VSV-N Silent F222VSV-M Y61Snon-coding c3058T CoV2-Swt R683GCoV2-Swt |
| | | S813FCoV2-Swt G1251* |
| | SF12 | VSV-M E213KCoV2-Swt Silent Y248CoV2-Swt H655YCoV2-Swt N709SCoV2-Swt |
| | | G1251*VSV-L A1283WSV-L Silent H2067 |
| | SF13 | CoV2-Swt H655YCoV2-Swt S1261*VSV-L Silent I1992non-coding t13403C |
| | SF14 | VSV-M E213KCoV2-Swt N709SCoV2-Swt G1251* |
| | SF15 | VSV-M E213KCoV2-Swt N709SCoV2-Swt G1251* |
| | SF16 | VSV-M E213KCoV2-Swt N709SCoV2-Swt G1251* |
| | SF17 | non-coding c3058T CoV2-Swt R683GCoV2-Swt D1118ACoV2-Swt G1251*non-coding |
| | | g13407T |
| | SF18 | VSV-M E213Knon-codmg t3074C CoV2-Swt N709SCoV2-Swt G1251*VSV-L C1076Y |
| | SF19 | VSV-M E213KCoV2-Swt N709SCoV2-Swt G1251*VSV-L L285S |
| | MB1 | VSV-M Y61Snon-coding c3058T CoV2-Swt R683GCoV2-Swt S813FCoV2-Swt G1251* |

[0406] We did not proceed with clones that comprised the E213K mutation in the VSV-M protein as this mutation is associated with VSV attenuation. Clone MB1 comprised a Y61S mutation in the VSV-M protein, four mutations in the SARS-CoV-2 S protein—a non-coding nucleotide mutation C3058T; two amino acid substitutions R683G and S813F; and a premature stop codon at nucleotide G6852T (amino acid G1251*). The full nucleotide and amino acid sequences for clone MB1 are shown in FIGS. 24A-B. Clone MB2 comprised two mutations in the SARS-CoV-2 S protein, H655Y and G1251, and a silent I1343I mutation in the VSV-L protein. The full nucleotide and amino acid sequences for clone MB2 are shown in FIGS. 21A-G.

### Example 9. Modeling Sequence Variants on SARS-CoV-2 S Protein Structure to Ensure Changes Did not Impact Critical Functional Epitopes

[0407] Given that mutations were found in the SARS-CoV-2 S protein of MB1 and MB2, we used modeling to predict the impact of the identified sequence variations on the SARS-CoV-2 S protein structure. The findings from our modeling efforts for MB1 and MB2 are described in Table 8.

TABLE 8
Modeling of Sequence Variations on SARS-CoV-2 S Protein

| | | | | |
|---|---|---|---|---|
| | | Surface | Type of | |
| Mutation | Protein | exposure | change | Notes |

Sequence variations in MB1

| | | | | |
|---|---|---|---|---|
| R683G | SARS-CoV-2 | Disordered | Basic to | Reduces S1/S2 cleavage |
| | S protein | | nonpolar | |
| | Furin site | | | |
| S813F | SARS-CoV-2 | Disordered | Polar to | Very close to the S2′ cleavage |
| | S protein | | nonpolar | site (R815) where cleavage |
| | S2/HR1 | | | exposed the fusion peptide |
| Y61S | M | Yes | Nonpolar | Y61 forms a hydrogen bond |
| | | | to polar | with K215; K215 mutation |
| | | | | has been found to make the |
| | | | | virus temperature sensitive |

Sequence variations in MB2

| | | | | |
|---|---|---|---|---|
| H655Y | SARS-CoV-2 | Yes | Basic to | Expected to promote more |
| | S protein SD2 | | polar | efficient glycosylation |

[0408] We found no predicted impact on the structural stability of SARS-CoV-2 S protein. There was also minimal to no sequence variation in the receptor binding domain of SARS-CoV-2 S protein or known binding sites for neutralizing antibodies to SARS-CoV-2 S protein.

[0409] The H655Y substitution occurs adjacent to a consensus site (NxS/T where x is any amino acid) in the SARS-CoV-2 S protein that can be modified by N-linked glycosylation. The H655Y substitution generates a sequence context that is expected to promote more efficient glycosylation at this location.

### Example 10. rVSVΔG-SARS-CoV-2 S Protein Expression as Detected by Western Blot

[0410] We analyzed the expression of SARS-CoV-2 S protein in Vero cells were infected with the clone isolates (FIGS. 9 and 10A-C). Cells were harvested from 48 to 72-hour post infection. Cell lysates were prepared from infected cells using CelLytic M buffer (Sigma #C2978) supplemented with 1% protease inhibitors. Cell lysates were clarified by centrifugation at 13000 rpm for 5 min. To denature, sample was mixed with 4XLSD loading buffer (Thermofisher #NP0007) and 10× reducing buffer (ThermoFisher #NP0009), boiled at 80° C. for 10 minutes.

[0411] The denatured samples were subjected to SDS polyacrylamide gel electrophoresis, transferred to nictrocellulose membrane and incubate with blocking buffer (Thermofisher #37539) for 2 hours at room temperature. Monoclonal antibody recognizing the S2 subunit (GeneTex Cat #GTX632604) was used to probe the full-length S protein and the post-translationally cleaved S2 subunit respectively. Secondary antibody conjugated to HRP was used to allow the chemiluminescence detection of the specific bands.

[0412] Mutations in the Furin cleavage sites affected the full-length S protein processing to S1 and S2 subunits which could be visualized on the Western (FIGS. 9 and 10A-C). For example, both clone isolates SF1 and SF2 had the R683G mutation (FIG. 10A). The amount of the S2 protein in clone isolates SF1 and SF2 were reduced compared to the clone isolate SF3 without such mutation. In FIG. 10B, clone MB1 had full-length S protein remaining as a result of reduced S1/S2 cleavage, indicative of the R683G mutation confirmed by sequencing (see Example 8 above). In FIG. 10C clone MB2, in contrast, had complete cleavage of full-length S protein.

### Example 11. PRNT Assay to Evaluate Effect of Mutations in the rVSVΔG-SARS-CoV-2 S Protein

[0413] We conducted a PRNT assay to determine if any of the mutations found in the rVSVΔG-SARS-CoV-2 S protein affected the ability of monoclonal antibodies (mAbs) in convalescent sera to neutralize the recombinant virus; convalescent sera were collected from individuals who were infected with SARS-CoV-2. The PRNT assay is described below in Example 15, Sections I and K. Effective neutralization of the candidate premaster seed virus was viewed was evidence that the recombinant virus was expressing SARS-CoV-2 S protein in an immunologically relevant conformation. The titers of each of the clones identified in the three groups (i.e., Round 1, serum-containing medium, and serum-free medium) are shown in FIG. 25. All of the recombinant viruses tested were neutralized by convalescent sera to varying degrees, including clones MB1 and MB2.

### Example 12. Ability of Recombinant VSV Particles to Infect hACE2-expressing Cells

[0414] Several clone isolates were tested to ensure that the mutations in VSVΔG-SARS-CoV-2 S protein do not prevent infection of human cells. HeLa cells expressing human ACE2 (hACE2 cells) were infected with a subset of nine clones (four isolated in serum-containing medium and five identified isolated in serum-free medium; see Example 7 above). Each infected cell line was analyzed for the level viral of infection by flow virometry (i.e., viral particles were detected by flow cytometry; FIGS. 26A and B). hACE2 cells infected with rVSVΔG-SARS-CoV-2 were visualized with anti-VSV-N antibody and anti-SARS-CoV-2 S protein antibody. Double positive cells (in the upper right hand quarter of each plot) showed the relative number of positive cells. All nine clones that were tested infected hAVE2 cells to varying degrees, with clones MB1 and SF11 having the most number of infected hACE2 cells (FIG. 26B). Sequencing results confirmed that MB1 and SF11 were genetically identical.

### Example 13. Ability of Recombinant VSV Particles to Bind to hACE2 and Monoclonal Antibodies

[0415] In order to infect cells, the SARS-CoV-2 S protein is required to bind to hACE2. Four clones previously identified in serum-free medium, clones SC1, SC3, SC7, and MB2 (see Example 7 above), were tested for binding to hACE2 to ensure that any adaptive mutations in VSVΔG-SARS-CoV-2 do not disrupt hACE2 binding. Recombinant virus of clones SC1, SC3, SC7, and MB2 were analyzed by flow virometry. Viral particles were visualized with anti-VSV-N antibody and anti-huACE2 Ig antibody. All four clones bound to bound to the anti-huACE2 Ig antibody, regardless of whether the Furin cleavage site was intact or not (FIG. 27). These results indicate that the recombinant viruses of clones SC1, SC3, SC7, and MB2 may infect human cells.

### Example 14. Generation of rVSVΔG-SARS-CoV-2 S Clones MB1 and MB2

[0416] The process of generating rVSVΔG-SARS-CoV-2 S protein variants comprised serial passaging and nucleotide sequencing of transfected cells at key passages. Mutations may facilitate the adaptation of rVSVΔG-SARS-CoV-2 S protein to replicate in Vero E6 cells.

[0417] The variant rVSVΔG-SARS-CoV-2 clone MB1 was isolated in serum-free media and has a 23-amino acid C-terminal deletion. Due to the deletion, an endoplasmic reticulum retention sequence within the cytoplasmic domain of rVSVΔG-SARS-CoV-2 clone MB1 has been removed. rVSVΔG-SARS-CoV-2 clone MB1 also comprises the following mutations: R683G and S813F in the SARS-CoV-2 S protein, and Y61S in the VSV matrix protein. The clone MB1 sequence does not have a R685G or a 24-amino acid C-terminal deletion in the S protein.

[0418] The variant rVSVΔG-SARS-CoV-2 clone MB2 was isolated in serum-containing media and, like MB1, has a 23-amino acid C-terminal deletion. Due to the deletion, an endoplasmic reticulum retention sequence within the cytoplasmic domain of rVSVΔG-SARS-CoV-2 clone MB2 has been removed. rVSVΔG-SARS-CoV-2 clone MB2 also comprises the H655Y mutation the SARS-CoV-2 S protein, and Y61S in the VSV matrix protein. The clone MB2 sequence does not have a R685G or a 24-amino acid C-terminal deletion in the SARS-CoV-2 S protein.

### Example 15. Immunogenicity of rVSVΔG-SARS-CoV-2 Clones MB1 and MB2 in a Hamster Model of SARS-CoV-2 Infection

[0419] This example describes a nonclinical pharmacology study to evaluate the immunogenicity rVSVΔG-SARS-CoV-2 clones MB1 and MB2 and to determine if it protects against SARS-CoV-2 challenge. The Golden Syrian hamster model is suitable for the assessment as SARS-CoV-2 replicates in the hamster and aspects of COVID-19 are recapitulated post-infection (Chan J F, Zhang A J, Yuan S, Poon V K, Chan C C, Lee A C, et al. Simulation of the clinical and pathological manifestations of Coronavirus Disease 2019 (COVID-19) in golden Syrian hamster model: implications for disease pathogenesis and transmissibility. epub ahead of print: Clin Infect Dis. 2020 Mar. 26; ciaa325). The study was conducted in two parts to evaluate the ability of rVSVΔG-SARS-CoV-2 clone MB1 to protect against: (A) SARS-CoV-2-induced body weight loss; and (B) viral replication. The study also evaluated both the intramuscular (IM) injection route of administration and the oral-mucosal route of administration.

[0420] A. Test Article: rVSVΔG-SARS-CoV-2 Clones MB1 and MB2

[0421] rVSVΔG-SARS-CoV-2 clone MB1 comprises (from 5′ to 3′) VSV-N, VSV-P, VSV-M with Y61S, SARS-CoV-2 S protein with R683G and S813F mutations, and VSV-L.

[0422] rVSVΔG-SARS-CoV-2 clone MB2 comprises (from 5′ to 3′) VSV-N, VSV-P, VSV-M, SARS-CoV-2 S protein with H655Y and G1251* mutations, and VSV-L.

[0423] Descriptions and sequences for rVSVΔG-SARS-CoV-2 clones MB1 and MB2 are provided in Section II.F above; and FIGS. 21A-G and 24A-B.

[0424] 81 The formulation for rVSVΔG-SARS-CoV-2 clone MB1 comprised 10 mM Tromethamine (Tris) and 2.5 mg/mL rice-derived recombinant human serum albumin (rHSA).

[0425] B. Control Article: SARS-CoV-2 S Protein

[0426] The control article is the SARS-CoV-2 S protein (SARS-CoV-2 pre-S-His; no tag). The protein is adjuvanted with aluminum phosphate (2%) (AdjuPhos). The formulation comprised HEPES buffer and 2% aluminum phosphate.

[0427] C. Test Animals

[0428] Table 9 provides details on test animals used in the study. Procedures involving the care and use of animals in the study were reviewed and approved by the Institutional Animal Care and Use Committee at Merck Research Laboratories. During the study, the care and use of animals were conducted in accordance with the principles outlined in the guidance of the Association for Assessment and Accreditation of Laboratory Animal Care (AAALAC), the Animal Welfare Act, the American Veterinary Medical Association (AVMA) Euthanasia Panel on Euthanasia, and the Institute for Laboratory Animal Research (ILAR) Guide to the Care and Use of Laboratory Animals. Animals were assigned to study groups randomly, with an even gender distribution each study group.

TABLE 9
Test animals.

| | |
|---|---|
| Species | Mesoaicetus auratus (Golden Syrian hamster) |
| Sex | Male and female |
| Source | Envigo, Indianapolis, Indiana, USA |
| Number of animals used | 54 |
| Age of animals at experiment initiation | 6 to 8 weeks old |

[0429] D. Group Designation, Dose Levels, and Dosing Schedule

[0430] Group designation, dose levels, and dosing schedule for Part A of the study are presented in Table 10 and for Part B of the study in Table 11. The study included both IM and oral-mucosal routes of administration.

TABLE 10
Group Designation, Dose Levels, and Dosing Schedule
for Part A, Merck Study HAM-CoV-2-001

| | No. of | | Dose | | Vol. | Challenge Dose |
|---|---|---|---|---|---|---|
| Group | animals | Treatment | level ^{a} | ROA | (mL) | (Day) ^{b} |
| 1 | 5 | None | NA | NA | NA | 2 × 10⁴ |
| | | | | | | PFU SARS- |
| | | | | | | CoV-2 |
| | | | | | | (Day 28 post- |
| | | | | | | vaccination) |
| 2 | 5 | SARS-CoV-2 S | 10 μg | IM | 0.1 | 2 × 10⁴ |
| | | Protein | (40 μg | | | PFU SARS- |
| | | (adjuvanted | adjuvant) | | | CoV-2 |
| | | with | | | | (Day 28 post- |
| | | aluminum | | | | vaccination) |
| | | phosphate; | | | | |
| | | AdjuPhos) | | | | |
| 3 | 6 | rVSVΔG-SARS- | 2.97 × 10⁶ | IM | 0.1 | 2 × 10⁴ |
| | | CoV-2 clone | PFU | | | PFU SARS- |
| | | MB1 | | | | CoV-2 |
| | | | | | | (Day 28 post- |
| | | | | | | vaccination) |
| 4 | 6 | rVSVΔG-SARS- | 2.97 × 10⁵ | OM | 0.01 | 2 × 10⁴ |
| | | CoV-2 clone | PFU | | | PFU SARS- |
| | | MB1 | | | | CoV-2 |
| | | | | | | (Day 28 post- |
| | | | | | | vaccination) |

IM = intramuscular(ly); μg = microgram(s); mL = milliliter(s); NA = not applicable; No. = number; OM = oral mucosal; PFU = plaque-forming unit(s); ROA = route of administration; SARS = Severe acute respiratory syndrome; SARS-CoV-2 = SARS-associated coronavirus-2.
^{a} Nominal dose.
^{b} The challenge inoculum was administered 0.1 mL per animal, 0.05 mL per nostril.

TABLE 11
Group Designation, Dose Levels, and Dosing Schedule
for Part B, Merck Study HAM-CoV-2-001

| | No. of | | Dose | | Vol. | Challenge Dose |
|---|---|---|---|---|---|---|
| Group | animals | Treatment | level ^{a} | ROA | (mL) | (Day) ^{b} |
| 7 | 4 | None | NA | NA | NA | 2 × 10⁴ |
| | | | | | | PFU SARS- |
| | | | | | | CoV-2 |
| | | | | | | (Day 28 post- |
| | | | | | | vaccination) |
| 8 | 4 | rVSVΔG- | 2.97 × 10⁶ | IM | 0.1 | 2 × 10⁴ |
| | | SARS-CoV-2 | PFU | | | PFU SARS- |
| | | clone MB1 | | | | CoV-2 |
| | | | | | | (Day 28 post- |
| | | | | | | vaccination) |
| 9 | 4 | rVSVΔG- | 2.97 × 10⁵ | OM | 0.01 | 2 × 10⁴ |
| | | SARS-CoV-2 | PFU | | | PFU SARS- |
| | | clone MB1 | | | | CoV-2 |
| | | | | | | (Day 28 post- |
| | | | | | | vaccination) |

IM = intramuscular(ly); μg = microgram(s); mL = milliliter(s); NA = not applicable; No. = number; OM = oral mucosal; PFU = plaque-forming unit(s); ROA = route of administration; SARS = Severe acute respiratory syndrome; SARS-CoV-2 = SARS-associated coronavirus-2.
^{a} Nominal dose.
^{b} The challenge inoculum was administered 0.1 mL per animal, 0.05 mL per nostril.

[0431] E. Study Measurements

[0432] Serum was collected on Days 7, 14, and 26 post-vaccination in both Part A and Part B, and in Part A, on Day 42 (Day 14 post-challenge). Serum was assayed for anti-SARS-CoV-2 S protein-specific IgG titers and for anti-SARS-CoV-2 PRNT titers.

[0433] In Part B, scheduled necropsies were carried out for nares and lung tissue collection on Day 32 (Day 4 post-challenge). Processed samples were assayed for viral load.

[0434] In both Part A and Part B, body weights and clinical observations were made daily post-challenge. Clinical assessments included monitoring for signs of COVID-19, i.e., ruffled fur, hunched posture, labored breathing.

[0435] F. ELISA for Anti-SARS-CoV-2 S Protein-Specific IgG Titers

[0436] An ELISA was developed for the detection of anti-SARS-CoV-2 S protein-specific IgG antibodies in serum. Briefly, the endpoint titration method utilizes an indirect capture ELISA format in which the S1 SARS-CoV-2 S protein is used as the solid-phase immobilized antigen and horseradish peroxidase-labeled anti-hamster IgG is used for detection. The primary assay endpoint is reported as the reciprocal of the highest dilution above the assay cut point.

[0437] To coat plates, diluted SARS-CoV-2 S protein RBD-His recombinant protein, was added at 50 μL per well into half-area 96 well ELISA plates, covered, and incubated at 4° C. overnight. Plates were washed with PBST (1×PBS, pH 7.4, 0.05% Tween-20) and blocked by adding 150 μL per well of blocking buffer (PBST, 3% w/v milk) and allowed to incubate at 37° C. for 1.5 hours. A 1:100 dilution of each test serum sample was prepared using dilution solution (PBST, 2% w/v milk) in a 96-well U-bottom plate. Blocked assay plates were then washed with PBST. After adding 50 μL per well of dilution solution to the wells in columns 2-12, 75 μL per well of diluted test serum samples was added from the U-bottom plate into wells of column 1 and a 3-fold serial dilution was performed across the plate until column 11, leaving the wells in column 12 as the blank. The test serum sample-filled assay plates were then incubated at 37° C. for 1 hour. After washing assay plates with PBST, 50 μL per well of diluted secondary antibody HRP-conjugated goat anti-Golden Syrian Hamster IgG antibody (1:6,000 in dilution solution) was added to each well and incubated at 37° C. for 1 hour. After washing plates with PBST, 50 μL per well of TMB was added per well and incubated at room temperature for 10 minutes; the enzymatic reaction was stopped with addition of 50 μL per well of stop solution (2 N sulfuric acid). Absorbance at OD at 450 nm was determined using a VersaMax™ microplate reader (Molecular Devices, San Jose, Calif., USA) with SoftMax Pro GxP Data Acquisition software. Endpoint titers were determined using GraphPad Prism software, version 8 (GraphPad Software, San Diego, Calif., USA).

[0438] G. SARS-CoV-2 S Protein-Specific Pseudoneutralization Assay (PRNT) (Merck and BIOQUAL Assays)

[0439] To measure SARS-CoV-2 S protein-specific neutralizing antibodies, a pseudoneutralization assay was conducted at Merck Research Laboratories. Briefly, serial dilutions of heat inactivated test sera were mixed with an equal volume of rVSVΔG-SARS-CoV-2 clone MB1 and neutralization was allowed to proceed for 1 hour at 37° C., 5% CO₂. Vero African Green Monkey Kidney cells were infected with the serum/virus mixture and incubated at 37° C. for 1 hour. A methylcellulose overlay was then placed on the cells and the plates were incubated at 37° C. for 2 days. Following incubation, the methylcellulose layer was removed, plates were fixed, blocked overnight, and immunostained using a rabbit anti-SARS-CoV-2 (2019-nCoV) S protein RBD polyclonal antibody and an AlexaFluor 488-labeled goat anti-rabbit secondary antibody. Immunostained plaques were visualized and counted using the EnSight™ (PerkinElmer, Waltham, Mass., USA). The primary assay endpoint is reported as the NT50 or the inverse of the dilution of serum at which 50% of the input virus is prevented from infecting cells. The assay LOD is 20.

[0440] H. Determination of Viral Load Using Quantitative Polymerase Chain Reaction (RT-qPCR)

[0441] Respiratory tract tissues were assessed for vaccine virus by RT-qPCR using standard molecular biology methods. Total RNA was isolated and reverse transcribed into cDNA. rVSVΔG-SARS-CoV-2 clone MB1 virus was quantified using PCR.

[0442] I. Statistical Analyses

[0443] For the ELISA, endpoint titers were determined as the reciprocal of the highest dilution above the assay cut point using GraphPad Prism software version 8 (GraphPad Software).

[0444] For the pseudoneutralization assay, neutralizing titers, i.e., NT50 values, were determined by 4-parameter curve fit using GraphPad Prism software v.8.1.1 (GraphPad Software) by plotting the log transformed sample dilution (x-axis) by the percent neutralization (y-axis). Percent neutralization was calculated by the following equation:

% Neutralization=(1−[(sample plaque count−average cell control count)/(average virus control−average cell control])×100

[0445] The geometric mean titer ±950% confidence interval was then determined with GraphPad Prism software.

[0446] J. Materials

[0447] Materials used in this study are provided in Table 12.

TABLE 12
List of Materials

| Material | Vendor | Catalog no./reference |
|---|---|---|
| SARS-CoV-2 challenge stock, isolate | BEI Resources | NR-52281 |
| USA-WA1/2020 | | |

ELISA

| | | |
|---|---|---|
| SARS-CoV-2 (COVID-19) S Protein | SinoBiological | Cat. no. 40592-V08H |
| RBD-His Recombinant Protein | | |
| Goat Anti-Golden Syrian Hamster | Rockland | Cat. no. 607-1302 |
| IgG(H + L) Antibody HRP conjugated | | |
| Assay control: SARS-CoV/ SARS-CoV-2 | GeneTex | Cat. no. GTX632604 |
| (COVID-19) S protein S2 antibody [1A9] | | |
| Assay control: SARS-CoV/SARS-CoV-2 | SinoBiological | Cat. no. 40150-D001 |
| S protein antibody, Chimeric Mab | | |
| Tween-20 | Sigma Aldrich | Cat. no. P9416 |
| Blotting-Grade Blocker (300 g, nonfat dry | Fisher Scientific | Cat. no. 1706404 |
| milk) | | |
| Dulbecco's phosphate-buffered saline, 1X | Corning | Cat. no. 21-031-CV |
| without calcium and magnesium | | |
| Pierce 1-Step Ultra ® TMB-ELISA | ThermoScientific | Cat. no. 34029 |
| ELISA Coating Buffer (5X) | BioLegend | Cat. no. 421701 |
| Sulfuric acid, 2N | Fisher Scientific | Cat. no. MK-H381-1 |
| Costar ® Assay Plate, 96 well, Clear, Flat | Corning | Cat. no. 3690 |
| Bottom, Half-area, High-Binding, | | |
| Polystyrene, Non-Sterile | | |
| Falcon Tissue Culture Plate, 96 well, U- | BD Biosciences | Cat. no. 353227 |
| Bottom with Low Evaporation Lid | | |

PENT Assay

| | | |
|---|---|---|
| rVSVΔG-SARS-CoV-2 clone MB1 (1^{st} lot); | Merck Research | NB-Barrcoll-5030085-0024 |
| titer = 5.7 × 10⁷ PFU/mL | Laboratories | NB-hartmame-5031563-0019 |
| VERO cells (African green monkey | ATCC | CCL-81 |
| kidney epithelial cells) | | |
| Fixation solution: 3.7% Formaldehyde | Polysciences, Inc. | Cat. no. 04018 |
| (Methanol Free) 10% UltraPure EM | | |
| Grade) diluted in PBS | | |
| Primary Antibody: SARS-CoV-2 (2019- | SinoBiological | Cat. no. 40592-T62 |
| nCoV) S protein RBD Antibody, Rabbit | | |
| PAb, Antigen Affinity Purified | | |
| Secondary Antibody: AlexaFluor 488 goat | Life Technologies | Cat. no. A1 1008 |
| anti-rabbit IgG (H7L) | | |
| BIOQUAL assay: | BEI Resources | NR-52281 |
| SARS-CoV-2 isolate USA-WA1/2020 | | |

COVID-19 = coronavirus disease of 2019; ELISA = enzyme-linked immunosorbent assay; H + L = heavy and light chain; His = histidine; IgG = immunoglobulin G; no. = number; MAb = monoclonal antibody; PAb = polyclonal antibody; PBS = phosphate-buffered saline; SARS-CoV-2 = Severe Acute Respiratory Syndrome Coronavirus 2; TMB = 3,3′,5,5′-tetramethylbenzidine; USA = United States of America.

[0448] K. Results: Evaluation of Immunogenicity

[0449] Post-vaccination ELISA titers for Part A are shown in FIG. 16 though Day 26. Post-vaccination PRNT neutralizing titers for Part A are shown in FIG. 17A for Days 7 and 26 (Merck), and in FIG. 17B for Day 14. Preliminary data through Day 26 suggest immunogenicity responses were initiated post-vaccination for rVSVΔG-SARS-CoV-2 clone MB1 by the IM route of administration.

[0450] PRNT neutralizing titers after 7 and 14 days following a single immunization are shown in FIG. 18. MB1 and MB2 showed comparable immunogenicity following IM administration. Results: Part A—Assessment of Protection Against Cody Weight Loss After SARS-CoV-2 Challenge

[0451] Body weight loss is a sign of COVID-19 in the hamster model of SARS-CoV-2 infection (Chan et al, 2020). Body weight (B3W) loss was assessed for 5 days post-challenge in Part A of the study. As shown in FIGS. 19A-C, IM administration of rVSVΔG-SARS-CoV-2 clones MB1 and MB2 protected animals from BW loss post-challenge. OM administration of rVSVΔG-SARS-CoV-2 either clone did not offer protection against BW loss, with loss similar to non-vaccinated animals.

[0452] L. Conclusions

[0453] Data through Day 26 suggest immunogenicity responses were initiated post-vaccination for rVSVΔG-SARS-CoV-2 clones MB1 (nucleic acid SEQ ID NO: 150 or amino acid sequences SEQ ID NOS: 151-153, 155, and 156) and MB2 (nucleic acid SEQ ID NO: 154 or amino acid sequences 152 and 155-158) by the IM route of administration as seen by anti-SARS-CoV-2 S protein IgG titers and SARS-CoV-2 PRNT titers.

[0454] Single-dose IM administration of rVSVΔG-SARS-CoV-2 clone MB1 protected animals from BW loss post-challenge, suggesting a protection against COVID-19.

[0455] Single-dose OM administration of rVSVΔG-SARS-CoV-2 clone MB1 did not protect animals from BW loss post-challenge, suggesting there was inadequate protection against COVID-19. This aligns with the low immunogenicity responses observed in the ELISA and PRNT assays.

### Example 16. Single-Nucleotide Polymorphisms (SNPs) in rVSVΔG-SARS-CoV-2 Clone MB1 (Nucleic Acid Sequence SEQ ID NO: 150 or Amino Acid Sequences SEQ ID NOS: 151-153, 155, and 156)

[0456] rVSVΔG-SARS-CoV-2 clone MB1, SEQ ID NO: 150, comprises a variant of the codon-optimized nucleotide sequence of rVSVΔG-SARS-CoV-2 S protein, SEQ ID NO: 160. Tables 13 and 14 summarize SNPs for rVSVΔG-SARS-CoV-2 clone MB1 (nucleic acid sequence SEQ ID NO: 150 or amino acid sequences SEQ ID NOS: 151-153, 155, and 156) relative to the expected nucleic acid SEQ ID NO: 150.

TABLE 13
SNP summary for rVSVΔG-SARS-CoV-2 clone MB1

| | | | | | | Variant call | Variant call | Is the variant | |
|---|---|---|---|---|---|---|---|---|---|
| | | | | Total | Variant | disbalance | entropy | call major or | Confidence |
| | | Variant call | | coverage | call | (F/R, closer | (closer to 1 | minor | in variant |
| Position | Ref | freq, pct | Variant | depth | depth | to 1 is better) | is better) | variant? | call |
| 6852 | G | 99.9 | T | 608675 | 608317 | 0.95 | 0.82 | major variant | High |
| 5064 | C | 99.9 | T | 468358 | 467908 | 0.90 | 0.85 | major variant | High |
| 11041 | C | 99.9 | A | 435606 | 435140 | 1.12 | 0.85 | major variant | High |
| 13438 | T | 54.4 | C | 195 | 106 | 0.93 | 0.62 | major variant | High |

Single nucleotide variant (SNV) calls ≥5% frequency with confidence calculations (indels excluded).

TABLE 14
Summary for position 6993-A

| Position 6993-A | Sample 24 |
|---|---|
| HIVE coverage at 6993 | 171326 |
| Ref gaaaaaaaac (SEQ ID NO: 194) | 7781 |
| Var g-aaaaaaac | 141410 |
| Var-A frequency | 0.83 |

### Example 17. SNPs in rVSVΔG-SARS-CoV-2 Clone MB2 (Nucleic Acid Sequence SEQ ID NO: 154 or Amino Acid Sequences SEQ ID NOS: 152 and 155-158)

[0457] rVSVΔG-SARS-CoV-2 clone MB2, SEQ ID NO: 154 comprises a variant of the codon-optimized rVSVΔG-SARS-CoV-2 S protein gene, SEQ ID NO: 158. The rVSVΔG-SARS-CoV-2 clone MB2 was identified after one round of clonal isolation. Tables 15 and 16 summarize SNPs for rVSVΔG-SARS-CoV-2 clone MB2 (nucleic acid sequence SEQ ID NO: 154 or amino acid sequences SEQ ID NOS: 152 and 155-158) relative to the expected wildtype SEQ ID NO: 159 for the S protein.

TABLE 15
SNP summary for rVSVΔG-SARS-CoV-2 clone MB2

| Position | Ref | Var | Plaque 13 |
|---|---|---|---|
| 5064 | C | T | 1.00 |
| 6852 | G | T | 1.00 |
| 6993 | A | — | * |
| 11041 | C | A | 1.00 |
| 11098 | C | A | 0.05 |
| 13434 | G | A | 0.12 |
| 13436 | C | A | 0.33 |

TABLE 16
Summary for position 6993

| Position 6993 | Plaque 13 |
|---|---|
| gaaaaaaaac (SEQ ID NO: 194) | 392 |
| gaaaaaaac | 16 |
| var frequency* | 0.04 |

### Example 18. Immunogenicity of rVSVΔG-SARS-CoV-2 Clone MB1 in a Hamster Model of SARS-CoV-2 Infection Following Mucosal Application

[0458] This example describes a nonclinical pharmacology study to evaluate the immunogenicity pf rVSVΔG-SARS-CoV-2 clone MB1 to determine if it protects against SARS-CoV-2 challenge. The Golden Syrian hamster model used here is as described in Example 15 above. The study was conducted in two parts to evaluate the ability of mucosal administration of rVSVΔG-SARS-CoV-2 clone MB1-A) to generate a neutralizing antibody response against SARS-CoV-2 pseudovirus; and B) to protect against SARS-CoV-2 replication in the nose and lung of challenged hamsters. The study evaluated both the oral-mucosal (OM), oral (PO), intranasal+oral-mucosal (IN+OM) and intramuscular (IM) injection routes of administration.

[0459] A. Test Article: rVSVΔG-SARS-CoV-2 Clone MB1

[0460] The composition and formulation of test article rVSVΔG-SARS-CoV-2 clone MB1 were as described in Example 15.A above.

[0461] Description and sequence for rVSVΔG-SARS-CoV-2 clone MB1 is provided in Section II.F above, and FIGS. 21A-G and 24A-B.

[0462] B. Test Animals

[0463] Details on test animals were as described in Example 15.C and Table 9 above.

[0464] C. Group Designation, Dose Levels, and Dosing Schedule

[0465] Group designation, dose levels, and dosing schedule for the study are shown in Table 17.

TABLE 17
Group Designation, Dose Levels and Dosing Schedule

| | No. of | Treatment | | | Challenge Dose |
|---|---|---|---|---|---|
| Group | animals | (SD0) | Route | Dose | (Day) ^{a} |
| 1 | 10 | PBS | IM | NA | 2 × 10⁴ |
| | | | | | PFU SARS- |
| | | | | | CoV-2 |
| | | | | | (Day 28 post- |
| | | | | | vaccination) |
| 2 | 10 | MB1 | IM | 3.00E+06 | 2 × 10⁴ |
| | | | | | PFU SARS- |
| | | | | | CoV-2 |
| | | | | | (Day 28 post- |
| | | | | | vaccination) |
| 3 | 10 | MB1 | IM | 1.00E+05 | 2 × 10⁴ |
| | | | | | PFU SARS- |
| | | | | | CoV-2 |
| | | | | | (Day 28 post- |
| | | | | | vaccination) |
| 4 | 10 | MB1 | IM | 1.00E+03 | 2 × 10⁴ |
| | | | | | PFU SARS- |
| | | | | | CoV-2 |
| | | | | | (Day 28 post- |
| | | | | | vaccination) |
| 5 | 10 | MB1 | OM | 3.00E+05 | 2 × 10⁴ |
| | | | | | PFU SARS- |
| | | | | | CoV-2 |
| | | | | | (Day 28 post- |
| | | | | | vaccination) |
| 6 | 10 | MB1 | PO | 3.00E+06 | 2 × 10⁴ |
| | | | | | PFU SARS- |
| | | | | | CoV-2 |
| | | | | | (Day 28 post- |
| | | | | | vaccination) |
| 7 | 10 | MB1 | IN + OM | 3.00E+05 | 2 × 10⁴ |
| | | | | | PFU SARS- |
| | | | | | CoV-2 |
| | | | | | (Day 28 post- |
| | | | | | vaccination) |
| 8 | 10 | MB1 | OM | 3.00E+05 | 2 × 10⁴ |
| | | | | | PFU SARS- |
| | | | | | CoV-2 |
| | | | | | (Day 28 post- |
| | | | | | vaccination) |

IM = intramuscular; OM = oral mucosal; PO = oral; IN+OM = intranasal + oral mucosal; NA = not applicable; No. = number; PFU = plaque-fbrming unit(s); SD0 = Study Day Zero (0); SARS = Severe acute respiratory syndrome; SARS-CoV- 2 = SARS-associated coronavirus-2.
The challenge inoculum was administered 0.1 mL per animal, 0.05 mL per nostril.

[0466] D. Study Measurements

[0467] Serum was collected on Days 7, 14, and 28 post-vaccination. Serum was assayed for anti-SARS-CoV-2 S protein-specific IgG titers and for anti-SARS-CoV-2 PRNT titers.

[0468] Scheduled necropsies were carried out for nares and lung tissue collection on Day 32 (Day 4 post-challenge). Processed samples were assayed for viral load.

[0469] E. ELISA for Anti-SARS-CoV-2 S Protein-Specific IgG Titers

[0470] The ELISA assays were as described in Example 15.F above.

[0471] F. SARS-CoV-2 S Protein-Specific Pseudoneutralization Assay (PRNT) (Merck and BIOQUAL Assays)

[0472] The pseudoneutralization assays were as described in Example 15.G above.

[0473] G. Determination of Viral Load Using TCID₅₀

[0474] A TCID₅₀ assay was conducted by BIOQUAL using their SOP BV-008. Vero E6 cells (ATCC cat. no. CRL-1586) were plated at 25,000 cells/well in DMEM+10% FBS+Gentamicin and the cultures were incubated at 37° C., 5.0% CO₂. Cells should be 80% to 100% confluent the following day. Medium was aspirated and replaced with 180 μL of DMEM+2% FBS+gentamicin. Twenty (20) μL of sample was added to top row in quadruplicate and mixed using a P200 pipettor 5 times. Using the pipettor, 20 μL was transferred to the next row, and repeated down the plate (columns A-H) representing 10-fold dilutions. The tips were disposed for each row and repeated until the last row. Positive (virus stock of known infectious titer in the assay) and negative (medium only) control wells were included in each assay set-up. The plates were incubated at 37° C., 5.0% CO₂ for 4 days. The cell monolayers were visually inspected for cytopathic effects (CPE). Non-infected wells had a clear confluent cell layer while infected cells have cell rounding. The presence of CPE was marked on the lab form as a “+” and absence of CPE as “−”. The assay was controlled by obtaining a TCID₅₀ value of the positive control within 2-fold of the expected value. The TCID₅₀ value was calculated using the Read-Muench formula and bar graphed using GraphPad Prism software version 8 (GraphPad Software)

[0475] H. Statistical Analyses

[0476] Statistical analyses methods for ELISA and the pseudoneutralization assay were as described in Example 15.1 above.

[0477] I. Determination of Viral Load or Serum Neutralizing Capacity Using TCID50 Assay (BIOQUAL)

[0478] The viral load in respiratory tract tissue samples and in serum samples was determined using the TCID50 assay and was conducted by BIOQUAL, Inc. per BIOQUAL procedure 100011.00.006.

[0479] The TCID50 assay quantifies viral infectious units by determining the cytopathic effect of samples on Vero E6 cells. Vero E6 cells have been subcloned for high expression of ACE2.

[0480] Briefly, Vero E6 cells were plated at 25,000 cells per well in DMEM containing 10% FBS and gentamicin, and incubated at 37° C., 5% carbon dioxide until cells were 80 to 100% confluent. Media was replaced in each well with 180 μL DMEM containing 2% FBS and gentamicin. Each sample was added as 20 μL in quadruplicate wells. Solutions in each well were mixed by trituration, and samples were then serially diluted ten-fold across the plate by transferring 20 μL into the next well, changing tips after each transfer. Sample plates were then incubated at 37° C., 5% carbon dioxide for 4 days. After 4 days each well was visually inspected for cytopathic effect. Wells with no sample, i.e., non-infected wells, were confirmed as having a clear confluent cell layer. The presence of cytopathic effect was noted and the TCID50 calculated using the Reed-Muench formula (Reed and Muench, 1938). The TCID50 of the positive control was confirmed to be within 2-fold of the expected value.

[0481] The limit of detection was determined to be 250 TCID50 per 0.2 g tissue. Serum capacity to prevent infection was determined using the TCID50 assay and expressed as IC90 and IC50 values.

[0482] J. Materials

[0483] Materials used in this study were as provided in Example 15.J and Table 12 above.

[0484] K. Results: Evaluation of Immunogenicity

[0485] PRNT neutralizing titers after 14 and 28 days following a single immunization are shown in FIG. 28. MB1 showed comparable immunogenicity following IM administration.

[0486] L. Assessment of Viral Load after Challenge

[0487] SARS-CoV-2 viral load was measured in lung and nose 4 days after challenge. Levels of replicating SARS-CoV-2 quantified by TCID₅₀ are shown in FIGS. 29A-D. Following IM administration, the 3×10≢pfu dose of MB1 led to a ˜3.5 log drop in SARS-CoV-2 in hamster lung (FIG. 29A) and a ˜1.5 log drop in SARS-CoV-2 in the nose (FIG. 29B). The 1×10≡pfu dose led to a smaller drop in viral titer and the 1×10\hat{ }3 pfu dose of MB1 was not notably different than no vaccine (FIGS. 29A-B). Following a single OM vaccination, 2/5 animals showed no evidence of SARS-CoV-2 in nose or lung, while the remaining animals showed lower to no protection from challenge (FIGS. 29C and 29D). Following PO vaccination, 3/5 animals showed no evidence of SARS-CoV-2 in nose or lung (FIGS. 29C and 29D). Following IN+OM vaccination, 5/5 animals had no evidence of SARS-CoV-2 in lung, and 1/5 animals had a slightly higher than background level of SARS-CoV-2 in nose.

[0488] M. Conclusions

[0489] Data through Day 26 suggest immunogenicity responses were initiated post-vaccination for rVSVΔG-SARS-CoV-2 clones MB1 (nucleic acid SEQ ID NO: 150 or amino acid sequences SEQ ID NOS: 151-153, 155, and 156) by the IM, OM, PO, and IN+OM routes of administration as seen by anti-SARS-CoV-2 S protein IgG titers and SARS-CoV-2 PRNT titers.

[0490] Single-dose IM administration of rVSVΔG-SARS-CoV-2 clone MB1 protected animals from SARS-CoV-2 in lung and nose post-challenge, suggesting a protection against COVID-19.

[0491] Single-dose OM administration of rVSVΔG-SARS-CoV-2 clone MB1 provided protection from SARS-CoV-2 in lung and nose in 3/10 hamsters, suggesting there was inadequate protection against COVID-19. This aligns with the lower immunogenicity responses observed in the ELISA and PRNT assays.

[0492] Single-dose PO administration of rVSVΔG-SARS-CoV-2 clone MB1 protected 3/5 animals from SARS-CoV-2 in lung and nose post-challenge, suggesting partial protection against COVID-19. This aligns with the immunogenicity responses observed in the ELISA and PRNT assays.

[0493] Single-dose IN+OM administration of rVSVΔG-SARS-CoV-2 clone MB1 protected animals from SARS-CoV-2 in lung and nose post-challenge, suggesting a protection against COVID-19.

### Example 19. Mucosal Vaccination

[0494] A. Vaccination by Applying VSVΔG-SARS-CoV-2 to the Mucosal Surfaces in the Nasal and/or Oral Cavities

[0495] In preclinical studies, SARS-CoV-2 infection has been demonstrated by applying virus directly to the mucosal surfaces in the nasal or oral cavities. Lee et al., Cell Rep Med, 1:100121 (2020). Consistent with these findings, studies have shown that the ACE2 used by the SARS-CoV-2 S protein for cell attachment is expressed by cells in these mucosal tissues. Ziegler et al., Cell, 181:1016-1035 e19 (2020); Suresh et al., Frontiers in Pharmacology, 11 (2020); Xu et al., Int J Oral Sci, 12:8 (2020). The susceptibility of these mucosal tissues to SARS-CoV-2 infection suggested that vaccination with VSVΔG-SARS-CoV-2 could be conducted by applying the vaccine virus directly to mucosal surfaces in the nasal or oral cavity. Vaccination with VSVΔG-SARS-CoV-2 by these routes may be advantageous because it has the potential to induce both systemic and local mucosal barrier immunities that can prevent severe disease in the lower respiratory tract as well as reduce SARS-CoV-2 replication in the upper airways, thereby reducing the risk of virus transmission. Gallo et al., Mucosal Immunol, doi:10.1038/s41385-020-00359-2 (2020).

[0496] To investigate the feasibility of mucosal vaccination with a VSVΔG-SARS-CoV-2 vaccine, rhesus macaques were vaccinated by three different methods (4 animals per method) using an investigational vaccine strain, Fp11, that differed from VSVΔG-SARS-CoV-2 MB1 as described in Table 18 below. In the first vaccination method, anesthetized animals were vaccinated by the intranasal route (IN) using a spray device (mucosal atomizer device; MAD™ from Teleflex Inc.) that delivered 1×10⁷ PFUs per nostril. In the second method, virus was delivered to the oral mucosa (OM) by applying 2×10⁷ PFUs dropwise to the top surface of the tongue of anesthetized macaques. The final method was a combination of both intranasal and oral mucosal approaches (IN+OM) with the total dose of 2×10⁷ PFUs split equally across the two nostrils and the tongue. Vaccinations were conducted at week 0 and week 8.

TABLE 18
Mutations in MB1 and Strain Fp11

| | Affected | | | |
|---|---|---|---|---|
| Donor | amino acid | | | |
| sequence | position | Wild-type | MB1 | Strain Fp11 |
| SARS-CoV- | C-terminus | No deletion | 23 amino acids deleted | 21 amino acids |
| 2 S protein | | | from the C-terminus | deleted from the C- |
| | | | | terminus |
| | 484 | E | E | D |
| | 655 | H | H | Y |
| | 683 | R | G | R |
| | 813 | S | F | S |
| VSV Matrix | 61 | Y | S | Y |
| VSV Matrix | 213 | E | E | K |

[0497] B. ELISA

[0498] Materials used for ELISA in this example are provided in Table 19.

TABLE 19
List of Materials

| Material | Vendor | Catalog no. |
|---|---|---|
| Adhesive Film for Microplates | VWR | 60941-064 |
| Costar ® assay plate, 96 well, clear, | Corning | 3690 |
| flat bottom, half-area, | | |
| high-binding, polystyrene, non-sterile | | |
| ELISA coating buffer (5X) | Biolegend | 421701 |
| Coating protein: SARS-CoV-2 spike protein prefusion- | Lake Pharma | 46328 |
| stabilized ectodomain, C-term His tag, | | |
| with furin cleavage | | |
| site removed, trimerization stabilized | | |
| Secondary antibody: horseradish peroxidase (HRP) | Jackson | 109-035-098 |
| conjugated goat anti-human IgG | ImmunoResearch | |
| Tween-20 | Sigma Aldrich | P9416 |
| 2N H₂SO₄ | Fisher Scientific | MK-H381-1 |
| DPBS, 1X without calcium and magnesium | Corning | 21-031-CV |
| 1-Step Ultra ® TMB-ELISA at room temperature | Thermo Scientific | 34029 |
| Tissue Culture Plate, 96 well, U-bottom with low | BD Falcon | 353227 |
| evaporation lid | | |
| Sterile pipets | VWR | |
| Cordless pipet-aid | Drummond | |
| Sterile barrier pipet tips | Ranin, BioHit, | |
| | Molecular | |
| | Bioproducts | |
| Pipettors | VWR, Ranin, BioHit | |
| Distilled or reverse osmosis purified water at room | | |
| temperature | | |
| ELISA coating buffer 1X diluted with distilled/reverse | Biolegend | |
| osmosis purified water | | |
| Plate wash buffer, PBST (1X PBS pH 7.4, 0.05% Tween- | | |
| 20) at room temperature | | |
| Blocking buffer solution (3% bovine serum albumin (BSA | | |
| pH 7.4) at room temperature | | |
| Dilution solution (1% BSA in 1X PBS pH 7.4) at room | | |
| temperature | | |
| Stop solution (2N H₂SO₄) at room temperature | | |
| ELx405 select deep well microplate washer | Biotek | |
| Versa Max microplate reader and SoftMax Pro GxP data | Molecular Devices | |
| acquisition software | | |
| GraphPad Prism 9 software | | |

[0499] The ELISA method was used to detect anti-SARS-CoV-2 S protein-specific IgG antibodies in the serum of vaccinated animals. The protein coating used for the ELISA method was a soluble SARS-CoV-2 S protein in which the S1 and S2 subunits were covalently linked.

[0500] 96 well ELISA plates were coated with 50 μL/well of SARS-CoV-2 antigen (1 ug/ml) diluted in 1× coating buffer. Only half of the wells in each plate were used. Each plate was covered with microplate adhesive film and incubated overnight at 4° C. The plates were washed using a plate washer. Then, the plates were blocked with 150 μL/well of blocking buffer and incubated at 37° C. for 1 hour 30 minutes.

[0501] Meanwhile, test serum was diluted in a 96-well U-bottom plate at 1:100 using dilution solution and set aside.

[0502] Back to the blocked plates, the blocked plates were washed using a plate washer. Wells in columns 2-12 were filled with 50 μL/well of dilution solution. For incubation with serum, 75 ul of diluted serum from the U-bottom plate was transferred into each well of column 1. A 3-fold serial dilution was performed across plate from column 2 through column 11, leaving the wells in column 12 as the blank. Plates were incubated at 37° C. for 1 hours.

[0503] The serum-treated plates were washed using a plate washer. For antibody labeling, 50 μL of diluted secondary antibody (1:5,000 in dilution solution) was added to each well. The plates were incubated at 37° C. for 1 hour.

[0504] The antibody-labeled plates were washed using a plate washer. 50 μL of 1-Step Ultra® TMB was added to each well at room temperature. The incubation period was 10 mins. 50 μL of Stop Solution was added to stop development. Plates were read using a plate reader at 450 nm.

[0505] C. Results

[0506] As shown in FIG. 30, the study results demonstrated that most macaques vaccinated with VSVΔG-SARS-CoV-2 strain Fp11 by the IN or IN+OM method developed detectable serum antibodies against the SARS-CoV-2 S protein by week 4 and all were positive by week 8. Animals vaccinated only by the OM method did not respond. To evaluate the effect of a second vaccination, macaques were vaccinated with identical dose and method at week 8. At two weeks following the second vaccination, there was a pronounced increase in serum antibody titers in animals vaccinated by the IN or IN+OM methods indicating the initial vaccination established immunologic memory that allowed a robust recall response following the second vaccination.

### Example 20. Embodiments

[0507] The following numbered items provide a description of certain embodiments herein.

[0508] Item 1. A recombinant vesicular stomatitis virus (VSV) vector, comprising a modified VSV genome, wherein the modified VSV genome comprises a foreign gene derived from a Severe Acute Respiratory Syndrome coronavirus 2 (SARS-CoV-2).

[0509] Item 2. A recombinant vesicular stomatitis virus (VSV) vector, comprising a modified VSV genome, wherein the modified VSV genome comprises a foreign gene encoding a Severe Acute Respiratory Syndrome coronavirus 2 (SARS-CoV-2) spike (S) protein or an immunogenic variant thereof.

[0510] Item 3. A recombinant vesicular stomatitis virus (VSV) vector, comprising a modified VSV genome, wherein the modified VSV genome comprises a portion of a VSV glycoprotein (G) gene and a foreign gene encoding an immunogenic variant of a Severe Acute Respiratory Syndrome coronavirus 2 (SARS-CoV-2) spike (S) protein.

[0511] Item 4. The recombinant VSV vector of any one of the preceding items, wherein the SARS-CoV-2 S protein consists of the amino acid sequence as shown in FIG. 1A or an amino acid sequence having GenBank Accession number gb_QHW06059, gb_QHZ00379, gb_QHR84449, gb_QIA20044, gb_QHZ00358, dbj_BCA25664, gb_QHZ87582, dbj_BCA25674, gb_QHZ00389, gb_QHZ87592, gb_QIB84673, gb_QHR63260, gb_QIA98606, gb_QIA98596, gb_QHR63250, gb_QHR63280, gb_QHR63290, gb_QHR63270, gb_QHZ00399, dbj_BCA25644, dbj_BCA25654, gb_QHO62877, ref_YP_00972439, gb_QHW06039, gb_QHO62112, gb_QHQ71973, gb_QHW06049, gb_QHO60594, gb_QHN73810, gb_QHO62107, gb_QHQ82464, dbj_BBW89517, gb_QHU79204, gb_QHQ71963, gb_QHU79194, gb_QHN73795, gb_QHU36864, gb_QHD43416, gb_QHU36854, gb_QHU36844, gb_QHU36834 or gb_QHU36824 as shown in FIG. 2.

[0512] 1 Item 5. The recombinant VSV vector of any one items 1-3, wherein the immunogenic variant of the SARS-CoV-2 S protein consists of an amino acid sequence at least 90% identical to that of the SARS-CoV-2 S protein.

[0513] Item 6. The recombinant VSV vector of any one items 1-3, wherein the immunogenic variant of the SARS-CoV-2 S protein is a fragment of the SARS-CoV-2 S protein having a deletion at the C-terminal end of the SARS-CoV-2 S protein.

[0514] Item 7. The recombinant VSV vector of item 1 or 2, wherein the immunogenic variant of the SARS-CoV-2 S protein is a fragment of the SARS-CoV-2 S protein lacking a cytoplasmic tail of the SARS-CoV-2 S protein.

[0515] Item 8. The recombinant VSV vector of item 1 or 2, wherein the immunogenic variant of the SARS-CoV-2 S protein is a fragment of the SARS-CoV-2 S protein lacking a cytoplasmic tail and a transmembrane domain of the SARS-CoV-2 S protein.

[0516] Item 9. The recombinant VSV vector of any one items 1-3, wherein the immunogenic variant of the SARS-CoV-2 S protein is a fragment of the SARS-CoV-2 S protein lacking a cytoplasmic tail of the SARS-CoV-2 S protein, and wherein the portion of the VSV-G gene encodes a cytoplasmic tail of a VSV-G protein.

[0517] Item 10. The recombinant VSV vector of any one items 1-3, wherein the immunogenic variant of the SARS-CoV-2 S protein is a fragment of the SARS-CoV-2 S protein lacking a cytoplasmic tail and a transmembrane domain of the SARS-CoV-2 S protein, and wherein the portion of the VSV-G gene encodes a cytoplasmic tail and a transmembrane domain of a VSV-G protein.

[0518] Item 11. The recombinant VSV vector of any one of the preceding items, wherein the modified VSV genome further comprises a VSV nucleoprotein (N) gene, a VSV phosphoprotein (P) gene, a VSV matrix protein (M) gene, and a VSV polymerase (L) gene arranged in sequence from 3′ end to 5′ end.

[0519] Item 12. The recombinant VSV vector of any one items 1-10, wherein the foreign gene is inserted on the 3′ end of the VSV-N gene.

[0520] Item 13. The recombinant VSV vector of any one items 1-10, wherein the foreign gene is between the VSV-N gene and the VSV-P gene.

[0521] Item 14. The recombinant VSV vector of any one items 1-10, wherein the foreign gene is between the VSV-P gene and the VSV-M gene.

[0522] Item 15. The recombinant VSV vector of any one items 1-10, wherein the foreign gene is between the VSV-M gene and the VSV-L gene.

[0523] Item 16. The recombinant VSV vector of any one items 1-10, wherein the foreign gene is on the 5′ end of the VSV-L gene.

[0524] Item 17. The recombinant VSV vector of item 1 or 2, wherein the foreign gene encodes the SARS-CoV-2 S protein, and wherein the modified VSV genome does not comprise a VSV glycoprotein (G) gene or a portion thereof.

[0525] Item 18. A recombinant replicable vesicular stomatitis virus (VSV) particle, comprising a modified VSV genome and a Severe Acute Respiratory Syndrome coronavirus 2 (SARSCoV-2) spike (S) protein or an immunogenic variant thereof on the surface of the recombinant replicable VSV particle, wherein the modified VSV genome comprises a foreign gene encoding the SARS-CoV-2 S protein or the immunogenic variant thereof.

[0526] Item 19. A recombinant replicable vesicular stomatitis virus (VSV) particle, comprising a modified VSV genome and an immunogenic variant of a Severe Acute Respiratory Syndrome coronavirus 2 (SARS-CoV-2) spike (S) protein on the surface of the recombinant replicable VSV particle, wherein the modified VSV genome comprises a portion of a VSV glycoprotein (G) gene and a foreign gene encoding the immunogenic variant of the SARSCoV-2 S protein.

[0527] Item 20. The recombinant replicable VSV particle of item 18 or 19, wherein the SARS10 CoV-2 S protein consists of the amino acid sequence as shown in FIG. 1A or an amino acid sequence having GenBank Accession number gb_QHW06059, gb_QHZ00379, gb_QHR84449, gb_QIA20044, gb_QHZ00358, dbj_BCA25664, gb_QHZ87582, dbj_BCA25674, gb_QHZ00389, gb_QHZ87592, gb_QIB84673, gb_QHR63260, gb_QIA98606, gb_QIA98596, gb_QHR63250, gb_QHR63280, gb_QHR63290, gb_QHR63270, gb_QHZ00399, dbj_BCA25644, dbj_BCA25654, gb_QHO62877, ref_YP_00972439, gb_QHW06039, gb_QHO62112, gb_QHQ71973, gb_QHW06049, gb_QHO60594, gb_QHN73810, gb_QHO62107, gb_QHQ82464, dbj_BBW89517, gb_QHU79204, gb_QHQ71963, gb_QHU79194, gb_QHN73795, gb_QHU36864, gb_QHD43416, gb_QHU36854, gb_QHU36844, gb_QHU36834 or gb_QHU36824 as shown in FIG. 2.

[0528] Item 21. The recombinant replicable VSV particle of item 18 or 19, wherein the immunogenic variant of the SARS-CoV-2 S protein consists of an amino acid sequence at least 90% identical to that of the SARS-CoV-2 S protein.

[0529] Item 22. The recombinant replicable VSV particle of item 18 or 19, wherein the immunogenic variant of the SARS-CoV-2 S protein is a fragment of the SARS-CoV-2 S protein having a deletion at the C-terminal end of the SARS-CoV-2 S protein.

[0530] Item 23. The recombinant replicable VSV particle of item 18, wherein the immunogenic variant of the SARS-CoV-2 S protein is a fragment of the SARS-CoV-2 S protein lacking a cytoplasmic tail of the SARS-CoV-2 S protein.

[0531] Item 24. The recombinant replicable VSV particle of item 18, wherein the immunogenic variant of the SARS-CoV-2 S protein is a fragment of the SARS-CoV-2 S protein lacking a cytoplasmic tail and a transmembrane domain of the SARS-CoV-2 S protein.

[0532] Item 25. The recombinant replicable VSV particle of item 18 or 19, wherein the immunogenic variant of the SARS-CoV-2 S protein is a fragment of the SARS-CoV-2 S protein lacking a cytoplasmic tail of the SARS-CoV-2 S protein, and wherein the portion of the VSV-G gene encodes a cytoplasmic tail of a VSV-G protein.

[0533] Item 26. The recombinant replicable VSV particle of item 18 or 19, wherein the immunogenic variant of the SARS-CoV-2 S protein is a fragment of the SARS-CoV-2 S protein lacking a cytoplasmic tail and a transmembrane domain of the SARS-CoV-2 S protein, and wherein the portion of the VSV-G gene encodes a cytoplasmic tail and a transmembrane domain of a VSV-G protein.

[0534] Item 27. The recombinant replicable VSV particle of any one of items 18-26, wherein the modified VSV genome further comprises a VSV nucleoprotein (N) gene, a VSV phosphoprotein (P) gene, a VSV matrix protein (M) gene, and a VSV polymerase (L) gene arranged in sequence from 3′ end to 5′ end.

[0535] Item 28. The recombinant replicable VSV particle of any one of items 18-27, wherein the foreign gene is inserted on the 3′ end of the VSV-N gene.

[0536] Item 29. The recombinant replicable VSV particle of any one of items 18-27, wherein the foreign gene is between the VSV-N gene and the VSV-P gene.

[0537] Item 30. The recombinant replicable VSV particle of any one of items 18-27, wherein the foreign gene is between the VSV-P gene and the VSV-M gene.

[0538] Item 31. The recombinant replicable VSV particle of any one of items 18-27, wherein the foreign gene is between the VSV-M gene and the VSV-L gene.

[0539] Item 32. The recombinant replicable VSV particle of any one of items 18-27, wherein the foreign gene is on the 5′ end of the VSV-L gene.

[0540] Item 33. The recombinant replicable VSV particle of item 18, wherein the foreign gene encodes the SARS-CoV-2 S protein, and wherein the modified VSV genome does not comprise a VSV glycoprotein (G) gene or a portion thereof.

[0541] Item 34. An immunogenic recombinant protein comprising a Severe Acute Respiratory Syndrome coronavirus 2 (SARS-CoV-2) spike (S) protein or a variant thereof derived from the recombinant VSV vector of any one of items 1-17.

[0542] Item 35. An immunogenic recombinant protein comprising a variant of a Severe Acute Respiratory Syndrome coronavirus 2 (SARS-CoV-2) spike (S) protein and a portion of a VSV glycoprotein (G).

[0543] Item 36. The immunogenic recombinant protein of item 34 or 35, wherein the SARSCoV-2 S protein consists of the amino acid sequence as shown in FIG. 1A or an amino acid sequence having GenBank Accession number gb_QHW06059, gb_QHZ00379, gb_QHR84449, gb_QIA20044, gb_QHZ00358, dbj_BCA25664, gb_QHZ87582, dbj_BCA25674, gb_QHZ00389, gb_QHZ87592, gb_QIB84673, gb_QHR63260, gb_QIA98606, gb_QIA98596, gb_QHR63250, gb_QHR63280, gb_QHR63290, gb_QHR63270, gb_QHZ00399, dbj_BCA25644, dbj_BCA25654, gb_QHO62877, ref_YP_00972439, gb_QHW06039, gb_QHO62112, gb_QHQ71973, gb_QHW06049, gb_QHO60594, gb_QHN73810, gb_QHO62107, gb_QHQ82464, dbj_BBW89517, gb_QHU79204, gb_QHQ71963, gb_QHU79194, gb_QHN73795, gb_QHU36864, gb_QHD43416, gb_QHU36854, gb_QHU36844, gb_QHU36834 or gb_QHU36824 as shown in FIG. 2.

[0544] Item 37. The immunogenic recombinant protein of item 34 or 35, wherein the variant of the SARS-CoV-2 S protein consists of an amino acid sequence at least 90% identical to that of the SARS-CoV-2 S protein.

[0545] Item 38. The immunogenic recombinant protein of item 34 or 35, wherein the variant of the SARS-CoV-2 S protein is a fragment of the SARS-CoV-2 S protein having a deletion at the C-terminal end of the SARS-CoV-2 S protein.

[0546] Item 39. The immunogenic recombinant protein of item 34, wherein the variant of the SARS-CoV-2 S protein is a fragment of the SARS-CoV-2 S protein lacking a cytoplasmic tail of the SARS-CoV-2 S protein.

[0547] Item 40. The immunogenic recombinant protein of item 34, wherein the variant of the SARS-CoV-2 S protein is a fragment of the SARS-CoV-2 S protein lacking a cytoplasmic tail and a transmembrane domain of the SARS-CoV-2 S protein.

[0548] Item 41. The immunogenic recombinant protein of item 34 or 35, wherein the variant of the SARS-CoV-2 S protein is a fragment of the SARS-CoV-2 S protein lacking a cytoplasmic tail of the SARS-CoV-2 S protein, and wherein the portion of the VSV-G gene encodes a cytoplasmic tail of a VSV-G protein.

[0549] Item 42. The immunogenic recombinant protein of item 34 or 35, wherein the variant of the SARS-CoV-2 S protein is a fragment of the SARS-CoV-2 S protein lacking a cytoplasmic tail and a transmembrane domain of the SARS-CoV-2 S protein, and wherein the portion of the VSV-G gene encodes a cytoplasmic tail and a transmembrane domain of a VSV-G protein. Item 43. A recombinant nucleic acid molecule comprising a nucleotide sequence encoding a Severe Acute Respiratory Syndrome coronavirus 2 (SARS-CoV-2) spike (S) protein or a variant thereof.

[0550] Item 44. The recombinant nucleic acid molecule of item 43, wherein the nucleotide sequence is the sequence shown in FIG. 1B, 1C, 1E, 1F, 1H, 1I, 1K, 1L, 1N, 1O, 1Q, 1R, 1T, 1U, 1W or 1X (SEQ ID NO: 2, 3, 5, 6, 8, 9, 11, 12, 14, 15, 17, 18, 20, 21, 23 or 24, respectively) or a nucleotide sequence encoding a SARS-CoV-2 S protein derived from the SARS-CoV-2 genome sequence having GenBank Accession Number LR757997, MT072688, MN996527, MT039873, MN938384, MT020781, MN996529, MN996530, MN996531, MT044258, LR757998, LR757996, MT066175, MT066176, LR757995, LC522972, LC522973, LC522974, LC522975, MT039887, MN988668, MN988669, MT044257, MT039888, MN997409, MN985325, MN994467, MT027062, MT027063, MT027064, MT020880, MT020881, MN988713, MT019533, MN994468, MT093571, MT019530, MT019532, MN975262, MN996528, MT007544, MT019529, MT019531, MT049951, MT039890, MN908947, NC_045512 or MT093631.

[0551] Item 45. A method for producing a recombinant replicable VSV particle, comprising (a) introducing the recombinant VSV vector of any one of items 1-17 into cells, whereby a recombinant replicable VSV particle is produced, and (b) expressing a Severe Acute Respiratory Syndrome coronavirus 2 (SARS-CoV-2) spike (S) protein or an immunogenic variant thereof on the surface of the recombinant replicable VSV particle.

[0552] Item 46. The method of item 45, wherein the cells are Vero cells.

[0553] Item 47. The method of item 45 or 46, further comprising purifying the recombinant replicable VSV particle from the cells.

[0554] Item 48. The method of item 45 or 46, further comprising purifying the SARS-CoV-2 S protein or an immunogenic variant thereof from the cells.

[0555] Item 49. The method of item 45 or 46, further comprising purifying the recombinant VSV vector from the cells.

[0556] Item 50. A recombinant cell comprising the recombinant VSV vector of any one of items 1-17 and producing a recombinant replicable VSV particle, wherein a Severe Acute Respiratory Syndrome coronavirus 2 (SARS-CoV-2) spike (S) protein or a variant thereof is expressed on the surface of the recombinant replicable VSV particle.

[0557] Item 52. A pharmaceutical composition comprising the recombinant VSV vector of any one of items 1-17, the recombinant replicable VSV particle of any one of items 18-33, the immunogenic recombinant protein of any one of items 34-42, the recombinant replicable VSV particle produced according to the method of any one of items 45-49, the Severe Acute Respiratory Syndrome coronavirus 2 (SARS-CoV-2) spike (S) protein or a variant thereof purified according to the method of item 48, or the recombinant VSV vector purified according to the method of item 49.

[0558] Item 53. The pharmaceutical composition of item 52, further comprising a pharmaceutically acceptable excipient.

[0559] Item 54. The pharmaceutical composition of item 52 or 53, wherein the pharmaceutical composition is a vaccine composition.

[0560] Item 55. The pharmaceutical composition of any one of items 52-54, wherein the pharmaceutical composition is formulated for oral, sublingual, intramuscular, intradermal, subcutaneous, intranasal, intraocular, rectal, transdermal, mucosal, topical or parenteral administration.

[0561] Item 56. An oral or oral mucosal composition, comprising an effective amount of the recombinant VSV vector of any one of items 1-17, the recombinant replicable VSV particle of any one of items 18-33, the immunogenic recombinant protein of any one of items 34-42, the recombinant replicable VSV particle produced according to the method of any one of items 45-49, the Severe Acute Respiratory Syndrome coronavirus 2 (SARS-CoV-2) spike (S) protein or a variant thereof purified according to the method of item 48, or the recombinant VSV vector purified according to the method of item 49.

[0562] Item 57. The oral or oral mucosal composition of item 56, wherein the oral or oral mucosal composition is formulated for buccal delivery.

[0563] Item 58. The oral or oral mucosal composition of item 56, wherein the oral or oral mucosal composition is formulated for gastrointestinal delivery.

[0564] Item 59. An intranasal composition, comprising an effective amount of the recombinant VSV vector of any one of items 1-17, the recombinant replicable VSV particle of any one of items 18-33, the immunogenic recombinant protein of any one of items 34-42, the recombinant replicable VSV particle produced according to the method of any one of items 45-49, the Severe Acute Respiratory Syndrome coronavirus 2 (SARS-CoV-2) spike (S) protein or a variant thereof purified according to the method of item 48, or the recombinant VSV vector purified according to the method of item 49.

[0565] Item 60. The intranasal composition of item 59, wherein the intranasal composition is formulated for nasal mucosal delivery.

[0566] Item 61. A vaccine composition comprising the recombinant replicable VSV particle of any one of items 18-33, the immunogenic recombinant protein of any one of items 34-42, the recombinant replicable VSV particle produced according to the method of any one of items 45-49, the Severe Acute Respiratory Syndrome coronavirus 2 (SARS-CoV-2) spike (S) protein or a variant thereof purified according to the method of item 48, or the recombinant VSV vector purified according to the method of item 49.

[0567] Item 62. The vaccine composition of item 61, wherein the vaccine composition is formulated for oral, sublingual, intramuscular, intradermal, subcutaneous, intranasal, intraocular, rectal, transdermal, mucosal, topical or parenteral administration.

[0568] Item 63. An oral or oral mucosal vaccine composition, comprising an effective amount of the recombinant replicable VSV particle of any one of items 18-33, the immunogenic recombinant protein of any one of items 34-42, the recombinant replicable VSV particle produced according to the method of any one of items 45-49, the Severe Acute Respiratory Syndrome coronavirus 2 (SARS-CoV-2) spike (S) protein or a variant thereof purified according to the method of item 48, or the recombinant VSV vector purified according to the method of item 49.

[0569] Item 64. The oral or oral mucosal vaccine composition of item 63, wherein the oral or oral mucosal vaccine composition is formulated for buccal delivery.

[0570] Item 65. The oral or oral mucosal vaccine composition of item 63, wherein the oral or oral mucosal vaccine composition is formulated for gastrointestinal delivery.

[0571] Item 66. An intranasal vaccine composition, comprising an effective amount of the recombinant replicable VSV particle of any one of items 18-33, the immunogenic recombinant protein of any one of items 34-42, the recombinant replicable VSV particle produced according to the method of any one of items 45-49, the Severe Acute Respiratory Syndrome coronavirus 2 (SARS-CoV-2) spike (S) protein or a variant thereof purified according to the method of item 48, or the recombinant VSV vector purified according to the method of item 49.

[0572] Item 67. A method of inducing an immunological response to a Severe Acute Respiratory Syndrome coronavirus 2 (SARS-CoV-2) in a subject, comprising administering to the subject an effective amount of the pharmaceutical composition of any one of items 52-55, whereby an immunological response is stimulated in the subject without causing a disease or symptom associated with the SARS-CoV-2 and the subject is vaccinated.

[0573] Item 68. The method of item 67, wherein the immunogenic response comprises a humoral response, a cellular antigen-specific immune response or a combination thereof.

[0574] Item 69. The method of item 67 or 68, wherein the immunological response comprises production of antibodies by the vaccinated subject that block SARS-CoV-2 infection, the method further comprising harvesting the antibodies from the vaccinated subject.

[0575] Item 70. The method of any one of items 67-69, wherein the antibodies are in the form of immune serum obtained from the vaccinated subject.

[0576] Item 71. The method of any one of items 67-69, wherein the antibodies are monoclonal antibodies prepared from SARS-CoV-2-specific B cells obtained from the vaccinated subject.

[0577] Item 72. The method of any one of items 69-71, further comprising mixing the harvested antibodies with a pharmaceutically acceptable excipient, whereby a pharmaceutical composition is prepared.

[0578] Item 73. A method of preventing infection of a subject by a Severe Acute Respiratory Syndrome coronavirus 2 (SARS-CoV-2), comprising administering to the subject an effective amount of the pharmaceutical composition of item 52 or 53, wherein the subject does not suffer a disease or symptom associated with the SARS-CoV-2.

[0579] Item 74. A method of vaccinating a subject against a Severe Acute Respiratory Syndrome coronavirus 2 (SARS-CoV-2), comprising administering to the subject an effective amount of the pharmaceutical composition of any one of items 52-55, wherein the subject does not suffer a disease or symptom associated with the SARS-CoV-2 and has not been exposed to the SARS-CoV-2.

[0580] Item 75. The method of any one of items 67-74, further comprising administering the pharmaceutical composition to a tissue in the subject that expresses a receptor for the SARS-CoV-2, and preventing or inhibiting binding of the SARS-CoV-2 to the receptor.

[0581] Item 76. The method of item 75, wherein the receptor is angiotensin-converting enzyme 2 (ACE2).

[0582] Item 77. The method of item 75 or 76, wherein the tissue is in the gastrointestinal (GI) tract of the subject.

[0583] Item 78. The method of any one of items 67-76, wherein the pharmaceutical composition is administered orally, sublingually, intramuscularly, intradermally, subcutaneously, intranasally, intraocularly, rectally, transdermally, mucosally, topically or parenterally.

[0584] Item 79. The method of any one of items 67-76, wherein the pharmaceutical composition is administered orally.

[0585] Item 80. The method of any one of items 67-76, wherein the pharmaceutical composition is administered intramuscularly.

[0586] Item 81. The method of any one of items 67-76, wherein the pharmaceutical composition is administered intranasally.

[0587] Item 82. A method of vaccinating a subject against a Severe Acute Respiratory Syndrome coronavirus 2 (SARS-CoV-2), comprising administering to the subject an effective amount of an oral or oral mucosal vaccine composition, wherein the oral or oral mucosal vaccine composition comprises the recombinant VSV vector of any one of items 1-17, the recombinant replicable VSV particle of any one of items 18-33, the immunogenic recombinant protein of any one of items 34-42, the recombinant replicable VSV particle produced according to the method of any one of items 45-49, the Severe Acute Respiratory Syndrome coronavirus 2 (SARS-CoV-2) spike (S) protein or a variant thereof purified according to the method of item 48, or the recombinant VSV vector purified according to the method of item 49, wherein the subject does not suffer a disease or symptom associated with the SARS-CoV-2 and has not been exposed to the SARS-CoV-2.

[0588] Item 83. The method of item 82, further comprising delivering to a tissue in the subject the recombinant VSV vector of any one of items 1-17, the recombinant replicable VSV particle of any one of items 18-33, the immunogenic recombinant protein of any one of items 34-42, the recombinant replicable VSV particle produced according to the method of any one of items 45-49, the Severe Acute Respiratory Syndrome coronavirus 2 (SARSCoV-2) spike (S) protein or a variant thereof purified according to the method of item 48, or the recombinant VSV vector purified according to the method of item 49, wherein the tissue is buccal mucosa.

[0589] Item 84. The method of item 82, further comprising delivering to a tissue in the subject the recombinant VSV vector of any one of items 1-17, the recombinant replicable VSV particle of any one of items 18-33, the immunogenic recombinant protein of any one of items 34-42, the recombinant replicable VSV particle produced according to the method of any one of items 45-49, the Severe Acute Respiratory Syndrome coronavirus 2 (SARSCoV-2) spike (S) protein or a variant thereof purified according to the method of item 48, or the recombinant VSV vector purified according to the method of item 49, wherein the tissue is gastrointestinal mucosa.

[0590] Item 85. A method of vaccinating a subject against a Severe Acute Respiratory Syndrome coronavirus 2 (SARS-CoV-2), comprising administering to the subject an effective amount of an intranasal vaccine composition, wherein the intranasal mucosal vaccine composition comprises the recombinant VSV vector of any one of items 1-17, the recombinant replicable VSV particle of any one of items 18-33, the immunogenic recombinant protein of any one of items 34-42, the recombinant replicable VSV particle produced according to the method of any one of items 45-49, the Severe Acute Respiratory Syndrome coronavirus 2 (SARS-CoV-2) spike (S) protein or a variant thereof purified according to the method of item 48, or the recombinant VSV vector purified according to the method of item 49, wherein the subject does not suffer a disease or symptom associated with the SARS-CoV-2 and has not been exposed to the SARS-CoV-2.

[0591] Item 86. The method of item 85, further comprising delivering to a tissue in the subject the recombinant VSV vector of any one of items 1-17, the recombinant replicable VSV particle of any one of items 18-33, the immunogenic recombinant protein of any one of items 34-42, the recombinant replicable VSV particle produced according to the method of any one of items 45-49, the Severe Acute Respiratory Syndrome coronavirus 2 (SARSCoV-2) spike (S) protein or a variant thereof purified according to the method of item 48, or the recombinant VSV vector purified according to the method of item 49, wherein the tissue is intranasal mucosa.

[0592] Item 87. The method of item 82 or 85, further comprising delivering to a tissue in the subject the recombinant VSV vector of any one of items 1-17, the recombinant replicable VSV particle of any one of items 18-33, the immunogenic recombinant protein of any one of items 34-42, the recombinant replicable VSV particle produced according to the method of any one of items 45-49, the Severe Acute Respiratory Syndrome coronavirus 2 (SARSCoV-2) spike (S) protein or a variant thereof purified according to the method of item 48, or the recombinant VSV vector purified according to the method of item 49, wherein the tissue expresses a receptor for the SARS-CoV-2.

[0593] Item 88. The method of any one of items 82, 85, or 87, wherein the receptor is angiotensin-converting enzyme 2 (ACE2).

[0594] Item 89. The method of any one of items 82, 85, 87, or 88, further comprising preventing or inhibiting binding of the SARS-CoV-2 to the receptor after the subject is exposed to the SARS-CoV-2.

[0595] Item 90. The method of any one of items 67-89, wherein the subject is a male.

[0596] Item 91. The method of any one of items 67-89, wherein the subject is a female.

[0597] Item 92. The method of any one of items 67-91, wherein the subject has a preexisting medical condition.

[0598] Item 93. The method of item 92, wherein the pre-existing medical condition is selected from the group consisting of high blood pressure, a heart disease, diabetes, a lung disease and combinations thereof.

[0599] Item 94. The method of any one of items 67-93, wherein the pharmaceutical composition is administered in a single dose.

[0600] Item 95. The method of any one of items 67-93, wherein the pharmaceutical composition is administered in two or multiple doses.

[0601] Item 96. The method of item 95, wherein the first dose is for a priming immunization and the second dose is a boosting immunization.

[0602] Item 97. A method of producing an adaptive mutant of the recombinant replicable VSV particle of any one of items 18-33, comprising growing the recombinant replicable VSV particle in a cell culture, changing a condition of the cell culture, identifying a mutant of the recombinant replicable VSV particle exhibiting greater replication capacity than the recombinant replicable VSV particle, whereby an adaptive mutant of the recombinant replicable VSV particle is obtained.

[0603] Item 98. The method of item 97, wherein the condition is selected from the group consisting of temperature, culture medium and cell substrate.

[0604] Item 99. The method of item 97 or 98, wherein the adaptive mutant exhibits at least 50% greater replication capacity than the recombinant replicable VSV particle. All documents, books, manuals, papers, patents, published patent applications, guides, abstracts, and other references cited herein are incorporated by reference in their entirety. Other embodiments will be apparent to those skilled in the art from consideration and practice of the disclosure. It is intended that the specification and examples be considered as exemplary and embodiments should be construed in accordance with the appended claims and any equivalents thereof.

The application's sequence listing, which the Patent Office published only in electronic form, follows.

SEQUENCE LISTING (192 sequences)

SEQ ID NO: 1 - protein, 1273 aa, Artificial Sequence
  Synthetic: Construct 1: wt S protein amino acid sequence
MFVFLVLLPLVSSQCVNLTTRTQLPPAYTNSFTRGVYYPDKVFRSSVLHSTQDLFLPFFSNVTWFHAIHVSGTNGTKRFDNPVLPFNDGVYFASTEKSNIIRGWIFGTTLDSKTQSLLIVNNATNVVIKVCEFQFCNDPFLGVYYHKNNKSWMESEFRVYSSANNCTFEYVSQPFLMDLEGKQGNFKNLREFVFKNIDGYFKIYSKHTPINLVRDLPQGFSALEPLVDLPIGINITRFQTLLALHRSYLTPGDSSSGWTAGAAAYYVGYLQPRTFLLKYNENGTITDAVDCALDPLSETKCTLKSFTVEKGIYQTSNFRVQPTESIVRFPNITNLCPFGEVFNATRFASVYAWNRKRISNCVADYSVLYNSASFSTFKCYGVSPTKLNDLCFTNVYADSFVIRGDEVRQIAPGQTGKIADYNYKLPDDFTGCVIAWNSNNLDSKVGGNYNYLYRLFRKSNLKPFERDISTEIYQAGSTPCNGVEGFNCYFPLQSYGFQPTNGVGYQPYRVVVLSFELLHAPATVCGPKKSTNLVKNKCVNFNFNGLTGTGVLTESNKKFLPFQQFGRDIADTTDAVRDPQTLEILDITPCSFGGVSVITPGTNTSNQVAVLYQDVNCTEVPVAIHADQLTPTWRVYSTGSNVFQTRAGCLIGAEHVNNSYECDIPIGAGICASYQTQTNSPRRARSVASQSIIAYTMSLGAENSVAYSNNSIAIPTNFTISVTTEILPVSMTKTSVDCTMYICGDSTECSNLLLQYGSFCTQLNRALTGIAVEQDKNTQEVFAQVKQIYKTPPIKDFGGFNFSQILPDPSKPSKRSFIEDLLFNKVTLADAGFIKQYGDCLGDIAARDLICAQKFNGLTVLPPLLTDEMIAQYTSALLAGTITSGWTFGAGAALQIPFAMQMAYRFNGIGVTQNVLYENQKLIANQFNSAIGKIQDSLSSTASALGKLQDVVNQNAQALNTLVKQLSSNFGAISSVLNDILSRLDKVEAEVQIDRLITGRLQSLQTYVTQQLIRAAEIRASANLAATKMSECVLGQSKRVDFCGKGYHLMSFPQSAPHGVVFLHVTYVPAQEKNFTTAPAICHDGKAHFPREGVFVSNGTHWFVTQRNFYEPQIITTDNTFVSGNCDVVIGIVNNTVYDPLQPELDSFKEELDKYFKNHTSPDVDLGDISGINASVVNIQKEIDRLNEVAKNLNESLIDLQELGKYEQYIKWPWYIWLGFIAGLIAIVMVTIMLCCMTSCCSCLKGCCSCGSCCKFDEDDSEPVLKGVKLHYT

SEQ ID NO: 2 - DNA, 3846 bp, Artificial Sequence
  Synthetic: Construct 1: nucleotide sequence of wt S protein to be added to Vector A
ctcgagaggagccaccatgttcgtgttcctggtgctattacctctggtttcgtctcaatgcgtaaaccttacaactagaactcagcttcctccagcatacacaaattccttcactcgcggagtgtattatcctgataaggtctttcgatcatcagtgttgcattccacccaggatttgtttctcccgttcttttcaaatgtaacttggttccatgctatacatgtttccggaaccaatggaacaaagagatttgataacccagtgttaccatttaacgacggagtttatttcgcatcaactgagaaatccaatatcattagaggctggattttcggaacgaccctggattctaaaacgcaatccttgctgattgttaataatgcaacaaatgtggtcattaaagtctgtgaattccaattttgcaatgatccatttctcggcgtctattaccacaagaataacaaatcttggatggagtcagagttcagggtttatagttccgcaaataattgtacttttgaatacgtttcccaaccattcttaatggacttggagggaaaacagggaaattttaagaatctaagagaattcgtctttaagaatattgatggatatttcaagatctattcaaaacatacacctataaacctagttagagatctcccgcaagggttttcagccctagagccactagttgacctgccaattgggatcaacattactagattccagaccctactcgctctgcatcggtcatatttgacaccaggagattcatcgtcaggatggaccgctggagcagctgcttactatgttgggtatctgcaacctagaacatttctcctaaagtataatgaaaacgggactattacagacgcagtcgattgcgcactggatccactctcagagacaaagtgcactctaaaatcattcactgtcgagaaaggaatctatcaaacatcaaatttcagggtccagccaactgagagtattgtccggttccctaacataactaacttgtgccccttcggagaggttttcaatgctactcggttcgccagcgtctacgcatggaacagaaagaggatttcaaactgtgtcgcagattatagcgtcctctataattcagcatcattcagtacatttaaatgctatggtgtcagccccaccaaacttaatgacttatgttttaccaatgtatatgcagattcctttgtaatcagaggtgacgaagtgaggcaaatcgcacctggacagaccggaaagattgctgattataattataaactccctgatgattttaccggatgtgttattgcttggaacagcaataacctcgatagtaaggtcggaggaaactataactatttgtacagactgtttagaaagtcgaatttgaaaccttttgaaagagacatatccaccgagatttaccaggcgggcagcacaccgtgtaatggtgtagaaggattcaattgttactttcccctgcaatcatatgggtttcaaccaaccaatggagtcggatatcaaccatatcgtgtcgtcgtcctttccttcgagctgcttcatgcaccagctacagtctgcggacctaagaagagcactaatcttgtcaagaacaaatgtgtgaactttaattttaatggattaacaggaaccggagttttgaccgagagtaataagaagttcttgccgttccagcaatttggacgagacattgctgacaccacagatgcggttcgtgacccgcaaactttagagatcctagacatcaccccatgttcattcggtggagtttccgttattactcctggaacgaatacaagcaatcaagttgccgttctctatcaagatgttaattgtacagaagtgcctgtggccattcatgcagatcaactaacaccaacttggagagtttacagcactgggtccaatgtcttccaaacgcgcgccggctgcctcattggtgcagaacatgtgaataactcatacgaatgtgacattccaatcggtgccggcatatgcgcctcttaccagactcagactaattcgccaagaagagccaggtctgtcgcaagtcagtcaattattgcatacacaatgtcgttaggagcagagaatagtgtagcatactcaaacaattctatagcaatacctaccaacttcactatatcagtaactacagaaatattgccagtatccatgactaaaacaagtgtggattgcaccatgtacatctgtggagattccacagaatgcagcaatcttctcttgcaatacggatcattctgcacacaactgaatagggcactgactggaattgcagtcgagcaggataagaacacacaggaggtgtttgcccaagtcaaacaaatatacaaaacaccacccatcaaggattttggaggatttaatttctcacaaatactccccgacccatccaagccctccaaaaggagtttcattgaggacctcttgtttaataaggttaccttggcagatgccgggtttattaagcagtacggcgactgtcttggagacatagcagccagagatctaatttgtgcccagaaattcaatggactgacagtcctgcctcccttattaactgatgagatgatagctcagtatacatcagcattgttggctggtacaattacatctggatggacatttggtgccggagcggcattacaaatcccttttgcaatgcaaatggcctatagatttaatggaatcggagtaactcaaaatgttttatatgagaatcagaaattaattgcaaatcaattcaattcagctataggaaagattcaggattcactcagtagtacagcaagcgctctaggcaaattacaagacgtcgtcaatcagaatgcacaggcattaaatacactggtgaagcaattgagttccaatttcggagcaatttcatctgttctaaatgatatattgtcaagactggataaagtagaagccgaggtccaaatcgataggctgatcacaggaagacttcaatcactacagacatacgtcacccaacaactcatcagagcagcagaaattagagcctctgctaatctagccgcaacaaagatgtcagagtgcgtattgggacaatctaagagggtcgacttttgtggaaaggggtatcacttgatgtcctttcctcaatctgcaccacacggagttgtcttcttacatgtaacatatgtgcccgctcaagaaaagaatttcactacagcacctgcaatatgtcatgacggaaaagcacattttcctcgggagggagttttcgtttctaatggaacccattggttcgtgacccaaaggaacttttacgagcctcaaataattacaactgataatacattcgtttctggaaattgcgacgtagttataggtattgtaaataatactgtttatgaccctttacaacctgaactcgattccttcaaggaagaactcgacaaatattttaagaatcacacctcaccggacgttgacttaggagacatttccgggattaacgctagtgtagtcaatatccaaaaggagatagatagactgaatgaggtagcaaagaatcttaatgaatctttgatcgaccttcaggagctggggaagtacgaacaatacataaaatggccatggtacatttggctcgggtttattgctggactaattgcaatagtcatggtcactatcatgctgtgttgtatgacatcgtgctgctcatgcctcaagggatgttgtagctgtggatcttgttgcaagttcgatgaggatgattcagaaccagttttaaaaggagtaaagttgcattacacataaaggctagc

SEQ ID NO: 3 - DNA, 3987 bp, Artificial Sequence
  Synthetic: Construct 1: nucleotide sequence of wt S protein to be added to Vector B
ttcgaacaactaatatcctgtcttctctatccctatgaaaaaaactaacagagatcgatctgtttccttgacaccaggagccaccatgttcgtgttcctggtgctattacctctggtttcgtctcaatgcgtaaaccttacaactagaactcagcttcctccagcatacacaaattccttcactcgcggagtgtattatcctgataaggtctttcgatcatcagtgttgcattccacccaggatttgtttctcccgttcttttcaaatgtaacttggttccatgctatacatgtttccggaaccaatggaacaaagagatttgataacccagtgttaccatttaacgacggagtttatttcgcatcaactgagaaatccaatatcattagaggctggattttcggaacgaccctggattctaaaacgcaatccttgctgattgttaataatgcaacaaatgtggtcattaaagtctgtgaattccaattttgcaatgatccatttctcggcgtctattaccacaagaataacaaatcttggatggagtcagagttcagggtttatagttccgcaaataattgtacttttgaatacgtttcccaaccattcttaatggacttggagggaaaacagggaaattttaagaatctaagagaattcgtctttaagaatattgatggatatttcaagatctattcaaaacatacacctataaacctagttagagatctcccgcaagggttttcagccctagagccactagttgacctgccaattgggatcaacattactagattccagaccctactcgctctgcatcggtcatatttgacaccaggagattcatcgtcaggatggaccgctggagcagctgcttactatgttgggtatctgcaacctagaacatttctcctaaagtataatgaaaacgggactattacagacgcagtcgattgcgcactggatccactctcagagacaaagtgcactctaaaatcattcactgtcgagaaaggaatctatcaaacatcaaatttcagggtccagccaactgagagtattgtccggttccctaacataactaacttgtgccccttcggagaggttttcaatgctactcggttcgccagcgtctacgcatggaacagaaagaggatttcaaactgtgtcgcagattatagcgtcctctataattcagcatcattcagtacatttaaatgctatggtgtcagccccaccaaacttaatgacttatgttttaccaatgtatatgcagattcctttgtaatcagaggtgacgaagtgaggcaaatcgcacctggacagaccggaaagattgctgattataattataaactccctgatgattttaccggatgtgttattgcttggaacagcaataacctcgatagtaaggtcggaggaaactataactatttgtacagactgtttagaaagtcgaatttgaaaccttttgaaagagacatatccaccgagatttaccaggcgggcagcacaccgtgtaatggtgtagaaggattcaattgttactttcccctgcaatcatatgggtttcaaccaaccaatggagtcggatatcaaccatatcgtgtcgtcgtcctttccttcgagctgcttcatgcaccagctacagtctgcggacctaagaagagcactaatcttgtcaagaacaaatgtgtgaactttaattttaatggattaacaggaaccggagttttgaccgagagtaataagaagttcttgccgttccagcaatttggacgagacattgctgacaccacagatgcggttcgtgacccgcaaactttagagatcctagacatcaccccatgttcattcggtggagtttccgttattactcctggaacgaatacaagcaatcaagttgccgttctctatcaagatgttaattgtacagaagtgcctgtggccattcatgcagatcaactaacaccaacttggagagtttacagcactgggtccaatgtcttccaaacgcgcgccggctgcctcattggtgcagaacatgtgaataactcatacgaatgtgacattccaatcggtgccggcatatgcgcctcttaccagactcagactaattcgccaagaagagccaggtctgtcgcaagtcagtcaattattgcatacacaatgtcgttaggagcagagaatagtgtagcatactcaaacaattctatagcaatacctaccaacttcactatatcagtaactacagaaatattgccagtatccatgactaaaacaagtgtggattgcaccatgtacatctgtggagattccacagaatgcagcaatcttctcttgcaatacggatcattctgcacacaactgaatagggcactgactggaattgcagtcgagcaggataagaacacacaggaggtgtttgcccaagtcaaacaaatatacaaaacaccacccatcaaggattttggaggatttaatttctcacaaatactccccgacccatccaagccctccaaaaggagtttcattgaggacctcttgtttaataaggttaccttggcagatgccgggtttattaagcagtacggcgactgtcttggagacatagcagccagagatctaatttgtgcccagaaattcaatggactgacagtcctgcctcccttattaactgatgagatgatagctcagtatacatcagcattgttggctggtacaattacatctggatggacatttggtgccggagcggcattacaaatcccttttgcaatgcaaatggcctatagatttaatggaatcggagtaactcaaaatgttttatatgagaatcagaaattaattgcaaatcaattcaattcagctataggaaagattcaggattcactcagtagtacagcaagcgctctaggcaaattacaagacgtcgtcaatcagaatgcacaggcattaaatacactggtgaagcaattgagttccaatttcggagcaatttcatctgttctaaatgatatattgtcaagactggataaagtagaagccgaggtccaaatcgataggctgatcacaggaagacttcaatcactacagacatacgtcacccaacaactcatcagagcagcagaaattagagcctctgctaatctagccgcaacaaagatgtcagagtgcgtattgggacaatctaagagggtcgacttttgtggaaaggggtatcacttgatgtcctttcctcaatctgcaccacacggagttgtcttcttacatgtaacatatgtgcccgctcaagaaaagaatttcactacagcacctgcaatatgtcatgacggaaaagcacattttcctcgggagggagttttcgtttctaatggaacccattggttcgtgacccaaaggaacttttacgagcctcaaataattacaactgataatacattcgtttctggaaattgcgacgtagttataggtattgtaaataatactgtttatgaccctttacaacctgaactcgattccttcaaggaagaactcgacaaatattttaagaatcacacctcaccggacgttgacttaggagacatttccgggattaacgctagtgtagtcaatatccaaaaggagatagatagactgaatgaggtagcaaagaatcttaatgaatctttgatcgaccttcaggagctggggaagtacgaacaatacataaaatggccatggtacatttggctcgggtttattgctggactaattgcaatagtcatggtcactatcatgctgtgttgtatgacatcgtgctgctcatgcctcaagggatgttgtagctgtggatcttgttgcaagttcgatgaggatgattcagaaccagttttaaaaggagtaaagttgcattacacataaagctcaaatcctgcacaacagattcttcatgtttgaaccaaatcaacttgtgatatcatgctcaaagaggccttaattaa

SEQ ID NO: 4 - protein, 1242 aa, Artificial Sequence
  Synthetic: Construct 2: S protein with CT deletion
MFVFLVLLPLVSSQCVNLTTRTQLPPAYTNSFTRGVYYPDKVFRSSVLHSTQDLFLPFFSNVTWFHAIHVSGTNGTKRFDNPVLPFNDGVYFASTEKSNIIRGWIFGTTLDSKTQSLLIVNNATNVVIKVCEFQFCNDPFLGVYYHKNNKSWMESEFRVYSSANNCTFEYVSQPFLMDLEGKQGNFKNLREFVFKNIDGYFKIYSKHTPINLVRDLPQGFSALEPLVDLPIGINITRFQTLLALHRSYLTPGDSSSGWTAGAAAYYVGYLQPRTFLLKYNENGTITDAVDCALDPLSETKCTLKSFTVEKGIYQTSNFRVQPTESIVRFPNITNLCPFGEVFNATRFASVYAWNRKRISNCVADYSVLYNSASFSTFKCYGVSPTKLNDLCFTNVYADSFVIRGDEVRQIAPGQTGKIADYNYKLPDDFTGCVIAWNSNNLDSKVGGNYNYLYRLFRKSNLKPFERDISTEIYQAGSTPCNGVEGFNCYFPLQSYGFQPTNGVGYQPYRVVVLSFELLHAPATVCGPKKSTNLVKNKCVNFNFNGLTGTGVLTESNKKFLPFQQFGRDIADTTDAVRDPQTLEILDITPCSFGGVSVITPGTNTSNQVAVLYQDVNCTEVPVAIHADQLTPTWRVYSTGSNVFQTRAGCLIGAEHVNNSYECDIPIGAGICASYQTQTNSPRRARSVASQSIIAYTMSLGAENSVAYSNNSIAIPTNFTISVTTEILPVSMTKTSVDCTMYICGDSTECSNLLLQYGSFCTQLNRALTGIAVEQDKNTQEVFAQVKQIYKTPPIKDFGGFNFSQILPDPSKPSKRSFIEDLLFNKVTLADAGFIKQYGDCLGDIAARDLICAQKFNGLTVLPPLLTDEMIAQYTSALLAGTITSGWTFGAGAALQIPFAMQMAYRFNGIGVTQNVLYENQKLIANQFNSAIGKIQDSLSSTASALGKLQDVVNQNAQALNTLVKQLSSNFGAISSVLNDILSRLDKVEAEVQIDRLITGRLQSLQTYVTQQLIRAAEIRASANLAATKMSECVLGQSKRVDFCGKGYHLMSFPQSAPHGVVFLHVTYVPAQEKNFTTAPAICHDGKAHFPREGVFVSNGTHWFVTQRNFYEPQIITTDNTFVSGNCDVVIGIVNNTVYDPLQPELDSFKEELDKYFKNHTSPDVDLGDISGINASVVNIQKEIDRLNEVAKNLNESLIDLQELGKYEQYIKWPWYIWLGFIAGLIAIVMVTIMLCCMTSCCS

SEQ ID NO: 5 - DNA, 3753 bp, Artificial Sequence
  Synthetic: Construct 2: nucleotide sequence of S protein with CT deletion to be added to Vector A
ctcgagaggagccaccatgttcgtgttcctggtgctattacctctggtttcgtctcaatgcgtaaaccttacaactagaactcagcttcctccagcatacacaaattccttcactcgcggagtgtattatcctgataaggtctttcgatcatcagtgttgcattccacccaggatttgtttctcccgttcttttcaaatgtaacttggttccatgctatacatgtttccggaaccaatggaacaaagagatttgataacccagtgttaccatttaacgacggagtttatttcgcatcaactgagaaatccaatatcattagaggctggattttcggaacgaccctggattctaaaacgcaatccttgctgattgttaataatgcaacaaatgtggtcattaaagtctgtgaattccaattttgcaatgatccatttctcggcgtctattaccacaagaataacaaatcttggatggagtcagagttcagggtttatagttccgcaaataattgtacttttgaatacgtttcccaaccattcttaatggacttggagggaaaacagggaaattttaagaatctaagagaattcgtctttaagaatattgatggatatttcaagatctattcaaaacatacacctataaacctagttagagatctcccgcaagggttttcagccctagagccactagttgacctgccaattgggatcaacattactagattccagaccctactcgctctgcatcggtcatatttgacaccaggagattcatcgtcaggatggaccgctggagcagctgcttactatgttgggtatctgcaacctagaacatttctcctaaagtataatgaaaacgggactattacagacgcagtcgattgcgcactggatccactctcagagacaaagtgcactctaaaatcattcactgtcgagaaaggaatctatcaaacatcaaatttcagggtccagccaactgagagtattgtccggttccctaacataactaacttgtgccccttcggagaggttttcaatgctactcggttcgccagcgtctacgcatggaacagaaagaggatttcaaactgtgtcgcagattatagcgtcctctataattcagcatcattcagtacatttaaatgctatggtgtcagccccaccaaacttaatgacttatgttttaccaatgtatatgcagattcctttgtaatcagaggtgacgaagtgaggcaaatcgcacctggacagaccggaaagattgctgattataattataaactccctgatgattttaccggatgtgttattgcttggaacagcaataacctcgatagtaaggtcggaggaaactataactatttgtacagactgtttagaaagtcgaatttgaaaccttttgaaagagacatatccaccgagatttaccaggcgggcagcacaccgtgtaatggtgtagaaggattcaattgttactttcccctgcaatcatatgggtttcaaccaaccaatggagtcggatatcaaccatatcgtgtcgtcgtcctttccttcgagctgcttcatgcaccagctacagtctgcggacctaagaagagcactaatcttgtcaagaacaaatgtgtgaactttaattttaatggattaacaggaaccggagttttgaccgagagtaataagaagttcttgccgttccagcaatttggacgagacattgctgacaccacagatgcggttcgtgacccgcaaactttagagatcctagacatcaccccatgttcattcggtggagtttccgttattactcctggaacgaatacaagcaatcaagttgccgttctctatcaagatgttaattgtacagaagtgcctgtggccattcatgcagatcaactaacaccaacttggagagtttacagcactgggtccaatgtcttccaaacgcgcgccggctgcctcattggtgcagaacatgtgaataactcatacgaatgtgacattccaatcggtgccggcatatgcgcctcttaccagactcagactaattcgccaagaagagccaggtctgtcgcaagtcagtcaattattgcatacacaatgtcgttaggagcagagaatagtgtagcatactcaaacaattctatagcaatacctaccaacttcactatatcagtaactacagaaatattgccagtatccatgactaaaacaagtgtggattgcaccatgtacatctgtggagattccacagaatgcagcaatcttctcttgcaatacggatcattctgcacacaactgaatagggcactgactggaattgcagtcgagcaggataagaacacacaggaggtgtttgcccaagtcaaacaaatatacaaaacaccacccatcaaggattttggaggatttaatttctcacaaatactccccgacccatccaagccctccaaaaggagtttcattgaggacctcttgtttaataaggttaccttggcagatgccgggtttattaagcagtacggcgactgtcttggagacatagcagccagagatctaatttgtgcccagaaattcaatggactgacagtcctgcctcccttattaactgatgagatgatagctcagtatacatcagcattgttggctggtacaattacatctggatggacatttggtgccggagcggcattacaaatcccttttgcaatgcaaatggcctatagatttaatggaatcggagtaactcaaaatgttttatatgagaatcagaaattaattgcaaatcaattcaattcagctataggaaagattcaggattcactcagtagtacagcaagcgctctaggcaaattacaagacgtcgtcaatcagaatgcacaggcattaaatacactggtgaagcaattgagttccaatttcggagcaatttcatctgttctaaatgatatattgtcaagactggataaagtagaagccgaggtccaaatcgataggctgatcacaggaagacttcaatcactacagacatacgtcacccaacaactcatcagagcagcagaaattagagcctctgctaatctagccgcaacaaagatgtcagagtgcgtattgggacaatctaagagggtcgacttttgtggaaaggggtatcacttgatgtcctttcctcaatctgcaccacacggagttgtcttcttacatgtaacatatgtgcccgctcaagaaaagaatttcactacagcacctgcaatatgtcatgacggaaaagcacattttcctcgggagggagttttcgtttctaatggaacccattggttcgtgacccaaaggaacttttacgagcctcaaataattacaactgataatacattcgtttctggaaattgcgacgtagttataggtattgtaaataatactgtttatgaccctttacaacctgaactcgattccttcaaggaagaactcgacaaatattttaagaatcacacctcaccggacgttgacttaggagacatttccgggattaacgctagtgtagtcaatatccaaaaggagatagatagactgaatgaggtagcaaagaatcttaatgaatctttgatcgaccttcaggagctggggaagtacgaacaatacataaaatggccatggtacatttggctcgggtttattgctggactaattgcaatagtcatggtcactatcatgctgtgttgtatgacatcgtgctgctcataaaggctagc

SEQ ID NO: 6 - DNA, 3894 bp, Artificial Sequence
  Synthetic: Construct 2: nucleotide sequence of S protein with CT deletion to be added to Vector B
ttcgaacaactaatatcctgtcttctctatccctatgaaaaaaactaacagagatcgatctgtttccttgacaccaggagccaccatgttcgtgttcctggtgctattacctctggtttcgtctcaatgcgtaaaccttacaactagaactcagcttcctccagcatacacaaattccttcactcgcggagtgtattatcctgataaggtctttcgatcatcagtgttgcattccacccaggatttgtttctcccgttcttttcaaatgtaacttggttccatgctatacatgtttccggaaccaatggaacaaagagatttgataacccagtgttaccatttaacgacggagtttatttcgcatcaactgagaaatccaatatcattagaggctggattttcggaacgaccctggattctaaaacgcaatccttgctgattgttaataatgcaacaaatgtggtcattaaagtctgtgaattccaattttgcaatgatccatttctcggcgtctattaccacaagaataacaaatcttggatggagtcagagttcagggtttatagttccgcaaataattgtacttttgaatacgtttcccaaccattcttaatggacttggagggaaaacagggaaattttaagaatctaagagaattcgtctttaagaatattgatggatatttcaagatctattcaaaacatacacctataaacctagttagagatctcccgcaagggttttcagccctagagccactagttgacctgccaattgggatcaacattactagattccagaccctactcgctctgcatcggtcatatttgacaccaggagattcatcgtcaggatggaccgctggagcagctgcttactatgttgggtatctgcaacctagaacatttctcctaaagtataatgaaaacgggactattacagacgcagtcgattgcgcactggatccactctcagagacaaagtgcactctaaaatcattcactgtcgagaaaggaatctatcaaacatcaaatttcagggtccagccaactgagagtattgtccggttccctaacataactaacttgtgccccttcggagaggttttcaatgctactcggttcgccagcgtctacgcatggaacagaaagaggatttcaaactgtgtcgcagattatagcgtcctctataattcagcatcattcagtacatttaaatgctatggtgtcagccccaccaaacttaatgacttatgttttaccaatgtatatgcagattcctttgtaatcagaggtgacgaagtgaggcaaatcgcacctggacagaccggaaagattgctgattataattataaactccctgatgattttaccggatgtgttattgcttggaacagcaataacctcgatagtaaggtcggaggaaactataactatttgtacagactgtttagaaagtcgaatttgaaaccttttgaaagagacatatccaccgagatttaccaggcgggcagcacaccgtgtaatggtgtagaaggattcaattgttactttcccctgcaatcatatgggtttcaaccaaccaatggagtcggatatcaaccatatcgtgtcgtcgtcctttccttcgagctgcttcatgcaccagctacagtctgcggacctaagaagagcactaatcttgtcaagaacaaatgtgtgaactttaattttaatggattaacaggaaccggagttttgaccgagagtaataagaagttcttgccgttccagcaatttggacgagacattgctgacaccacagatgcggttcgtgacccgcaaactttagagatcctagacatcaccccatgttcattcggtggagtttccgttattactcctggaacgaatacaagcaatcaagttgccgttctctatcaagatgttaattgtacagaagtgcctgtggccattcatgcagatcaactaacaccaacttggagagtttacagcactgggtccaatgtcttccaaacgcgcgccggctgcctcattggtgcagaacatgtgaataactcatacgaatgtgacattccaatcggtgccggcatatgcgcctcttaccagactcagactaattcgccaagaagagccaggtctgtcgcaagtcagtcaattattgcatacacaatgtcgttaggagcagagaatagtgtagcatactcaaacaattctatagcaatacctaccaacttcactatatcagtaactacagaaatattgccagtatccatgactaaaacaagtgtggattgcaccatgtacatctgtggagattccacagaatgcagcaatcttctcttgcaatacggatcattctgcacacaactgaatagggcactgactggaattgcagtcgagcaggataagaacacacaggaggtgtttgcccaagtcaaacaaatatacaaaacaccacccatcaaggattttggaggatttaatttctcacaaatactccccgacccatccaagccctccaaaaggagtttcattgaggacctcttgtttaataaggttaccttggcagatgccgggtttattaagcagtacggcgactgtcttggagacatagcagccagagatctaatttgtgcccagaaattcaatggactgacagtcctgcctcccttattaactgatgagatgatagctcagtatacatcagcattgttggctggtacaattacatctggatggacatttggtgccggagcggcattacaaatcccttttgcaatgcaaatggcctatagatttaatggaatcggagtaactcaaaatgttttatatgagaatcagaaattaattgcaaatcaattcaattcagctataggaaagattcaggattcactcagtagtacagcaagcgctctaggcaaattacaagacgtcgtcaatcagaatgcacaggcattaaatacactggtgaagcaattgagttccaatttcggagcaatttcatctgttctaaatgatatattgtcaagactggataaagtagaagccgaggtccaaatcgataggctgatcacaggaagacttcaatcactacagacatacgtcacccaacaactcatcagagcagcagaaattagagcctctgctaatctagccgcaacaaagatgtcagagtgcgtattgggacaatctaagagggtcgacttttgtggaaaggggtatcacttgatgtcctttcctcaatctgcaccacacggagttgtcttcttacatgtaacatatgtgcccgctcaagaaaagaatttcactacagcacctgcaatatgtcatgacggaaaagcacattttcctcgggagggagttttcgtttctaatggaacccattggttcgtgacccaaaggaacttttacgagcctcaaataattacaactgataatacattcgtttctggaaattgcgacgtagttataggtattgtaaataatactgtttatgaccctttacaacctgaactcgattccttcaaggaagaactcgacaaatattttaagaatcacacctcaccggacgttgacttaggagacatttccgggattaacgctagtgtagtcaatatccaaaaggagatagatagactgaatgaggtagcaaagaatcttaatgaatctttgatcgaccttcaggagctggggaagtacgaacaatacataaaatggccatggtacatttggctcgggtttattgctggactaattgcaatagtcatggtcactatcatgctgtgttgtatgacatcgtgctgctcataaagctcaaatcctgcacaacagattcttcatgtttgaaccaaatcaacttgtgatatcatgctcaaagaggccttaattaa

SEQ ID NO: 7 - protein, 1263 aa, Artificial Sequence
  Synthetic: Construct 3: S protein with VSVG-CT IND serotype
MFVFLVLLPLVSSQCVNLTTRTQLPPAYTNSFTRGVYYPDKVFRSSVLHSTQDLFLPFFSNVTWFHAIHVSGTNGTKRFDNPVLPFNDGVYFASTEKSNIIRGWIFGTTLDSKTQSLLIVNNATNVVIKVCEFQFCNDPFLGVYYHKNNKSWMESEFRVYSSANNCTFEYVSQPFLMDLEGKQGNFKNLREFVFKNIDGYFKIYSKHTPINLVRDLPQGFSALEPLVDLPIGINITRFQTLLALHRSYLTPGDSSSGWTAGAAAYYVGYLQPRTFLLKYNENGTITDAVDCALDPLSETKCTLKSFTVEKGIYQTSNFRVQPTESIVRFPNITNLCPFGEVFNATRFASVYAWNRKRISNCVADYSVLYNSASFSTFKCYGVSPTKLNDLCFTNVYADSFVIRGDEVRQIAPGQTGKIADYNYKLPDDFTGCVIAWNSNNLDSKVGGNYNYLYRLFRKSNLKPFERDISTEIYQAGSTPCNGVEGFNCYFPLQSYGFQPTNGVGYQPYRVVVLSFELLHAPATVCGPKKSTNLVKNKCVNFNFNGLTGTGVLTESNKKFLPFQQFGRDIADTTDAVRDPQTLEILDITPCSFGGVSVITPGTNTSNQVAVLYQDVNCTEVPVAIHADQLTPTWRVYSTGSNVFQTRAGCLIGAEHVNNSYECDIPIGAGICASYQTQTNSPRRARSVASQSIIAYTMSLGAENSVAYSNNSIAIPTNFTISVTTEILPVSMTKTSVDCTMYICGDSTECSNLLLQYGSFCTQLNRALTGIAVEQDKNTQEVFAQVKQIYKTPPIKDFGGFNFSQILPDPSKPSKRSFIEDLLFNKVTLADAGFIKQYGDCLGDIAARDLICAQKFNGLTVLPPLLTDEMIAQYTSALLAGTITSGWTFGAGAALQIPFAMQMAYRFNGIGVTQNVLYENQKLIANQFNSAIGKIQDSLSSTASALGKLQDVVNQNAQALNTLVKQLSSNFGAISSVLNDILSRLDKVEAEVQIDRLITGRLQSLQTYVTQQLIRAAEIRASANLAATKMSECVLGQSKRVDFCGKGYHLMSFPQSAPHGVVFLHVTYVPAQEKNFTTAPAICHDGKAHFPREGVFVSNGTHWFVTQRNFYEPQIITTDNTFVSGNCDVVIGIVNNTVYDPLQPELDSFKEELDKYFKNHTSPDVDLGDISGINASVVNIQKEIDRLNEVAKNLNESLIDLQELGKYEQYIKWPWYIWLGFIAGLIAIVMVTIMLRVGIYLCIKLKHTKKRQIYTDIEMNRLGK

SEQ ID NO: 8 - DNA, 3816 bp, Artificial Sequence
  Synthetic: Construct 3: nucleotide sequence of S protein with VSVG-CT IND serotype to be added to Vector A
ctcgagaggagccaccatgttcgtgttcctggtgctattacctctggtttcgtctcaatgcgtaaaccttacaactagaactcagcttcctccagcatacacaaattccttcactcgcggagtgtattatcctgataaggtctttcgatcatcagtgttgcattccacccaggatttgtttctcccgttcttttcaaatgtaacttggttccatgctatacatgtttccggaaccaatggaacaaagagatttgataacccagtgttaccatttaacgacggagtttatttcgcatcaactgagaaatccaatatcattagaggctggattttcggaacgaccctggattctaaaacgcaatccttgctgattgttaataatgcaacaaatgtggtcattaaagtctgtgaattccaattttgcaatgatccatttctcggcgtctattaccacaagaataacaaatcttggatggagtcagagttcagggtttatagttccgcaaataattgtacttttgaatacgtttcccaaccattcttaatggacttggagggaaaacagggaaattttaagaatctaagagaattcgtctttaagaatattgatggatatttcaagatctattcaaaacatacacctataaacctagttagagatctcccgcaagggttttcagccctagagccactagttgacctgccaattgggatcaacattactagattccagaccctactcgctctgcatcggtcatatttgacaccaggagattcatcgtcaggatggaccgctggagcagctgcttactatgttgggtatctgcaacctagaacatttctcctaaagtataatgaaaacgggactattacagacgcagtcgattgcgcactggatccactctcagagacaaagtgcactctaaaatcattcactgtcgagaaaggaatctatcaaacatcaaatttcagggtccagccaactgagagtattgtccggttccctaacataactaacttgtgccccttcggagaggttttcaatgctactcggttcgccagcgtctacgcatggaacagaaagaggatttcaaactgtgtcgcagattatagcgtcctctataattcagcatcattcagtacatttaaatgctatggtgtcagccccaccaaacttaatgacttatgttttaccaatgtatatgcagattcctttgtaatcagaggtgacgaagtgaggcaaatcgcacctggacagaccggaaagattgctgattataattataaactccctgatgattttaccggatgtgttattgcttggaacagcaataacctcgatagtaaggtcggaggaaactataactatttgtacagactgtttagaaagtcgaatttgaaaccttttgaaagagacatatccaccgagatttaccaggcgggcagcacaccgtgtaatggtgtagaaggattcaattgttactttcccctgcaatcatatgggtttcaaccaaccaatggagtcggatatcaaccatatcgtgtcgtcgtcctttccttcgagctgcttcatgcaccagctacagtctgcggacctaagaagagcactaatcttgtcaagaacaaatgtgtgaactttaattttaatggattaacaggaaccggagttttgaccgagagtaataagaagttcttgccgttccagcaatttggacgagacattgctgacaccacagatgcggttcgtgacccgcaaactttagagatcctagacatcaccccatgttcattcggtggagtttccgttattactcctggaacgaatacaagcaatcaagttgccgttctctatcaagatgttaattgtacagaagtgcctgtggccattcatgcagatcaactaacaccaacttggagagtttacagcactgggtccaatgtcttccaaacgcgcgccggctgcctcattggtgcagaacatgtgaataactcatacgaatgtgacattccaatcggtgccggcatatgcgcctcttaccagactcagactaattcgccaagaagagccaggtctgtcgcaagtcagtcaattattgcatacacaatgtcgttaggagcagagaatagtgtagcatactcaaacaattctatagcaatacctaccaacttcactatatcagtaactacagaaatattgccagtatccatgactaaaacaagtgtggattgcaccatgtacatctgtggagattccacagaatgcagcaatcttctcttgcaatacggatcattctgcacacaactgaatagggcactgactggaattgcagtcgagcaggataagaacacacaggaggtgtttgcccaagtcaaacaaatatacaaaacaccacccatcaaggattttggaggatttaatttctcacaaatactccccgacccatccaagccctccaaaaggagtttcattgaggacctcttgtttaataaggttaccttggcagatgccgggtttattaagcagtacggcgactgtcttggagacatagcagccagagatctaatttgtgcccagaaattcaatggactgacagtcctgcctcccttattaactgatgagatgatagctcagtatacatcagcattgttggctggtacaattacatctggatggacatttggtgccggagcggcattacaaatcccttttgcaatgcaaatggcctatagatttaatggaatcggagtaactcaaaatgttttatatgagaatcagaaattaattgcaaatcaattcaattcagctataggaaagattcaggattcactcagtagtacagcaagcgctctaggcaaattacaagacgtcgtcaatcagaatgcacaggcattaaatacactggtgaagcaattgagttccaatttcggagcaatttcatctgttctaaatgatatattgtcaagactggataaagtagaagccgaggtccaaatcgataggctgatcacaggaagacttcaatcactacagacatacgtcacccaacaactcatcagagcagcagaaattagagcctctgctaatctagccgcaacaaagatgtcagagtgcgtattgggacaatctaagagggtcgacttttgtggaaaggggtatcacttgatgtcctttcctcaatctgcaccacacggagttgtcttcttacatgtaacatatgtgcccgctcaagaaaagaatttcactacagcacctgcaatatgtcatgacggaaaagcacattttcctcgggagggagttttcgtttctaatggaacccattggttcgtgacccaaaggaacttttacgagcctcaaataattacaactgataatacattcgtttctggaaattgcgacgtagttataggtattgtaaataatactgtttatgaccctttacaacctgaactcgattccttcaaggaagaactcgacaaatattttaagaatcacacctcaccggacgttgacttaggagacatttccgggattaacgctagtgtagtcaatatccaaaaggagatagatagactgaatgaggtagcaaagaatcttaatgaatctttgatcgaccttcaggagctggggaagtacgaacaatacataaaatggccatggtacatttggctcgggtttattgctggactaattgcaatagtcatggtcactatcatgctgcgagttggtatttatctttgcattaaattaaagcacaccaagaaaagacagatttatacagacatagagatgaaccgacttggaaagtaaaggctagc

SEQ ID NO: 9 - DNA, 3957 bp, Artificial Sequence
  Synthetic: Construct 3: nucleotide sequence of S protein with VSVG-CT IND serotype to Vector B
ttcgaacaactaatatcctgtcttctctatccctatgaaaaaaactaacagagatcgatctgtttccttgacaccaggagccaccatgttcgtgttcctggtgctattacctctggtttcgtctcaatgcgtaaaccttacaactagaactcagcttcctccagcatacacaaattccttcactcgcggagtgtattatcctgataaggtctttcgatcatcagtgttgcattccacccaggatttgtttctcccgttcttttcaaatgtaacttggttccatgctatacatgtttccggaaccaatggaacaaagagatttgataacccagtgttaccatttaacgacggagtttatttcgcatcaactgagaaatccaatatcattagaggctggattttcggaacgaccctggattctaaaacgcaatccttgctgattgttaataatgcaacaaatgtggtcattaaagtctgtgaattccaattttgcaatgatccatttctcggcgtctattaccacaagaataacaaatcttggatggagtcagagttcagggtttatagttccgcaaataattgtacttttgaatacgtttcccaaccattcttaatggacttggagggaaaacagggaaattttaagaatctaagagaattcgtctttaagaatattgatggatatttcaagatctattcaaaacatacacctataaacctagttagagatctcccgcaagggttttcagccctagagccactagttgacctgccaattgggatcaacattactagattccagaccctactcgctctgcatcggtcatatttgacaccaggagattcatcgtcaggatggaccgctggagcagctgcttactatgttgggtatctgcaacctagaacatttctcctaaagtataatgaaaacgggactattacagacgcagtcgattgcgcactggatccactctcagagacaaagtgcactctaaaatcattcactgtcgagaaaggaatctatcaaacatcaaatttcagggtccagccaactgagagtattgtccggttccctaacataactaacttgtgccccttcggagaggttttcaatgctactcggttcgccagcgtctacgcatggaacagaaagaggatttcaaactgtgtcgcagattatagcgtcctctataattcagcatcattcagtacatttaaatgctatggtgtcagccccaccaaacttaatgacttatgttttaccaatgtatatgcagattcctttgtaatcagaggtgacgaagtgaggcaaatcgcacctggacagaccggaaagattgctgattataattataaactccctgatgattttaccggatgtgttattgcttggaacagcaataacctcgatagtaaggtcggaggaaactataactatttgtacagactgtttagaaagtcgaatttgaaaccttttgaaagagacatatccaccgagatttaccaggcgggcagcacaccgtgtaatggtgtagaaggattcaattgttactttcccctgcaatcatatgggtttcaaccaaccaatggagtcggatatcaaccatatcgtgtcgtcgtcctttccttcgagctgcttcatgcaccagctacagtctgcggacctaagaagagcactaatcttgtcaagaacaaatgtgtgaactttaattttaatggattaacaggaaccggagttttgaccgagagtaataagaagttcttgccgttccagcaatttggacgagacattgctgacaccacagatgcggttcgtgacccgcaaactttagagatcctagacatcaccccatgttcattcggtggagtttccgttattactcctggaacgaatacaagcaatcaagttgccgttctctatcaagatgttaattgtacagaagtgcctgtggccattcatgcagatcaactaacaccaacttggagagtttacagcactgggtccaatgtcttccaaacgcgcgccggctgcctcattggtgcagaacatgtgaataactcatacgaatgtgacattccaatcggtgccggcatatgcgcctcttaccagactcagactaattcgccaagaagagccaggtctgtcgcaagtcagtcaattattgcatacacaatgtcgttaggagcagagaatagtgtagcatactcaaacaattctatagcaatacctaccaacttcactatatcagtaactacagaaatattgccagtatccatgactaaaacaagtgtggattgcaccatgtacatctgtggagattccacagaatgcagcaatcttctcttgcaatacggatcattctgcacacaactgaatagggcactgactggaattgcagtcgagcaggataagaacacacaggaggtgtttgcccaagtcaaacaaatatacaaaacaccacccatcaaggattttggaggatttaatttctcacaaatactccccgacccatccaagccctccaaaaggagtttcattgaggacctcttgtttaataaggttaccttggcagatgccgggtttattaagcagtacggcgactgtcttggagacatagcagccagagatctaatttgtgcccagaaattcaatggactgacagtcctgcctcccttattaactgatgagatgatagctcagtatacatcagcattgttggctggtacaattacatctggatggacatttggtgccggagcggcattacaaatcccttttgcaatgcaaatggcctatagatttaatggaatcggagtaactcaaaatgttttatatgagaatcagaaattaattgcaaatcaattcaattcagctataggaaagattcaggattcactcagtagtacagcaagcgctctaggcaaattacaagacgtcgtcaatcagaatgcacaggcattaaatacactggtgaagcaattgagttccaatttcggagcaatttcatctgttctaaatgatatattgtcaagactggataaagtagaagccgaggtccaaatcgataggctgatcacaggaagacttcaatcactacagacatacgtcacccaacaactcatcagagcagcagaaattagagcctctgctaatctagccgcaacaaagatgtcagagtgcgtattgggacaatctaagagggtcgacttttgtggaaaggggtatcacttgatgtcctttcctcaatctgcaccacacggagttgtcttcttacatgtaacatatgtgcccgctcaagaaaagaatttcactacagcacctgcaatatgtcatgacggaaaagcacattttcctcgggagggagttttcgtttctaatggaacccattggttcgtgacccaaaggaacttttacgagcctcaaataattacaactgataatacattcgtttctggaaattgcgacgtagttataggtattgtaaataatactgtttatgaccctttacaacctgaactcgattccttcaaggaagaactcgacaaatattttaagaatcacacctcaccggacgttgacttaggagacatttccgggattaacgctagtgtagtcaatatccaaaaggagatagatagactgaatgaggtagcaaagaatcttaatgaatctttgatcgaccttcaggagctggggaagtacgaacaatacataaaatggccatggtacatttggctcgggtttattgctggactaattgcaatagtcatggtcactatcatgctgcgagttggtatttatctttgcattaaattaaagcacaccaagaaaagacagatttatacagacatagagatgaaccgacttggaaagtaaagctcaaatcctgcacaacagattcttcatgtttgaaccaaatcaacttgtgatatcatgctcaaagaggccttaattaa

SEQ ID NO: 10 - protein, 1266 aa, Artificial Sequence
  Synthetic: Construct 4: S protein with VSVG-TM-CT IND serotype
MFVFLVLLPLVSSQCVNLTTRTQLPPAYTNSFTRGVYYPDKVFRSSVLHSTQDLFLPFFSNVTWFHAIHVSGTNGTKRFDNPVLPFNDGVYFASTEKSNIIRGWIFGTTLDSKTQSLLIVNNATNVVIKVCEFQFCNDPFLGVYYHKNNKSWMESEFRVYSSANNCTFEYVSQPFLMDLEGKQGNFKNLREFVFKNIDGYFKIYSKHTPINLVRDLPQGFSALEPLVDLPIGINITRFQTLLALHRSYLTPGDSSSGWTAGAAAYYVGYLQPRTFLLKYNENGTITDAVDCALDPLSETKCTLKSFTVEKGIYQTSNFRVQPTESIVRFPNITNLCPFGEVFNATRFASVYAWNRKRISNCVADYSVLYNSASFSTFKCYGVSPTKLNDLCFTNVYADSFVIRGDEVRQIAPGQTGKIADYNYKLPDDFTGCVIAWNSNNLDSKVGGNYNYLYRLFRKSNLKPFERDISTEIYQAGSTPCNGVEGFNCYFPLQSYGFQPTNGVGYQPYRVVVLSFELLHAPATVCGPKKSTNLVKNKCVNFNFNGLTGTGVLTESNKKFLPFQQFGRDIADTTDAVRDPQTLEILDITPCSFGGVSVITPGTNTSNQVAVLYQDVNCTEVPVAIHADQLTPTWRVYSTGSNVFQTRAGCLIGAEHVNNSYECDIPIGAGICASYQTQTNSPRRARSVASQSIIAYTMSLGAENSVAYSNNSIAIPTNFTISVTTEILPVSMTKTSVDCTMYICGDSTECSNLLLQYGSFCTQLNRALTGIAVEQDKNTQEVFAQVKQIYKTPPIKDFGGFNFSQILPDPSKPSKRSFIEDLLFNKVTLADAGFIKQYGDCLGDIAARDLICAQKFNGLTVLPPLLTDEMIAQYTSALLAGTITSGWTFGAGAALQIPFAMQMAYRFNGIGVTQNVLYENQKLIANQFNSAIGKIQDSLSSTASALGKLQDVVNQNAQALNTLVKQLSSNFGAISSVLNDILSRLDKVEAEVQIDRLITGRLQSLQTYVTQQLIRAAEIRASANLAATKMSECVLGQSKRVDFCGKGYHLMSFPQSAPHGVVFLHVTYVPAQEKNFTTAPAICHDGKAHFPREGVFVSNGTHWFVTQRNFYEPQIITTDNTFVSGNCDVVIGIVNNTVYDPLQPELDSFKEELDKYFKNHTSPDVDLGDISGINASVVNIQKEIDRLNEVAKNLNESLIDLQELGKYEQYIKWPWYIWSSIASFFFIIGLIIGLFLVLRVGIYLCIKLKHTKKRQIYTDIEMNRLGK

SEQ ID NO: 11 - DNA, 3825 bp, Artificial Sequence
  Synthetic: Construct 4: nucleotide sequence of S protein with VSVG-TM-CT IND serotype to be added to Vector A
ctcgagaggagccaccatgttcgtgttcctggtgctattacctctggtttcgtctcaatgcgtaaaccttacaactagaactcagcttcctccagcatacacaaattccttcactcgcggagtgtattatcctgataaggtctttcgatcatcagtgttgcattccacccaggatttgtttctcccgttcttttcaaatgtaacttggttccatgctatacatgtttccggaaccaatggaacaaagagatttgataacccagtgttaccatttaacgacggagtttatttcgcatcaactgagaaatccaatatcattagaggctggattttcggaacgaccctggattctaaaacgcaatccttgctgattgttaataatgcaacaaatgtggtcattaaagtctgtgaattccaattttgcaatgatccatttctcggcgtctattaccacaagaataacaaatcttggatggagtcagagttcagggtttatagttccgcaaataattgtacttttgaatacgtttcccaaccattcttaatggacttggagggaaaacagggaaattttaagaatctaagagaattcgtctttaagaatattgatggatatttcaagatctattcaaaacatacacctataaacctagttagagatctcccgcaagggttttcagccctagagccactagttgacctgccaattgggatcaacattactagattccagaccctactcgctctgcatcggtcatatttgacaccaggagattcatcgtcaggatggaccgctggagcagctgcttactatgttgggtatctgcaacctagaacatttctcctaaagtataatgaaaacgggactattacagacgcagtcgattgcgcactggatccactctcagagacaaagtgcactctaaaatcattcactgtcgagaaaggaatctatcaaacatcaaatttcagggtccagccaactgagagtattgtccggttccctaacataactaacttgtgccccttcggagaggttttcaatgctactcggttcgccagcgtctacgcatggaacagaaagaggatttcaaactgtgtcgcagattatagcgtcctctataattcagcatcattcagtacatttaaatgctatggtgtcagccccaccaaacttaatgacttatgttttaccaatgtatatgcagattcctttgtaatcagaggtgacgaagtgaggcaaatcgcacctggacagaccggaaagattgctgattataattataaactccctgatgattttaccggatgtgttattgcttggaacagcaataacctcgatagtaaggtcggaggaaactataactatttgtacagactgtttagaaagtcgaatttgaaaccttttgaaagagacatatccaccgagatttaccaggcgggcagcacaccgtgtaatggtgtagaaggattcaattgttactttcccctgcaatcatatgggtttcaaccaaccaatggagtcggatatcaaccatatcgtgtcgtcgtcctttccttcgagctgcttcatgcaccagctacagtctgcggacctaagaagagcactaatcttgtcaagaacaaatgtgtgaactttaattttaatggattaacaggaaccggagttttgaccgagagtaataagaagttcttgccgttccagcaatttggacgagacattgctgacaccacagatgcggttcgtgacccgcaaactttagagatcctagacatcaccccatgttcattcggtggagtttccgttattactcctggaacgaatacaagcaatcaagttgccgttctctatcaagatgttaattgtacagaagtgcctgtggccattcatgcagatcaactaacaccaacttggagagtttacagcactgggtccaatgtcttccaaacgcgcgccggctgcctcattggtgcagaacatgtgaataactcatacgaatgtgacattccaatcggtgccggcatatgcgcctcttaccagactcagactaattcgccaagaagagccaggtctgtcgcaagtcagtcaattattgcatacacaatgtcgttaggagcagagaatagtgtagcatactcaaacaattctatagcaatacctaccaacttcactatatcagtaactacagaaatattgccagtatccatgactaaaacaagtgtggattgcaccatgtacatctgtggagattccacagaatgcagcaatcttctcttgcaatacggatcattctgcacacaactgaatagggcactgactggaattgcagtcgagcaggataagaacacacaggaggtgtttgcccaagtcaaacaaatatacaaaacaccacccatcaaggattttggaggatttaatttctcacaaatactccccgacccatccaagccctccaaaaggagtttcattgaggacctcttgtttaataaggttaccttggcagatgccgggtttattaagcagtacggcgactgtcttggagacatagcagccagagatctaatttgtgcccagaaattcaatggactgacagtcctgcctcccttattaactgatgagatgatagctcagtatacatcagcattgttggctggtacaattacatctggatggacatttggtgccggagcggcattacaaatcccttttgcaatgcaaatggcctatagatttaatggaatcggagtaactcaaaatgttttatatgagaatcagaaattaattgcaaatcaattcaattcagctataggaaagattcaggattcactcagtagtacagcaagcgctctaggcaaattacaagacgtcgtcaatcagaatgcacaggcattaaatacactggtgaagcaattgagttccaatttcggagcaatttcatctgttctaaatgatatattgtcaagactggataaagtagaagccgaggtccaaatcgataggctgatcacaggaagacttcaatcactacagacatacgtcacccaacaactcatcagagcagcagaaattagagcctctgctaatctagccgcaacaaagatgtcagagtgcgtattgggacaatctaagagggtcgacttttgtggaaaggggtatcacttgatgtcctttcctcaatctgcaccacacggagttgtcttcttacatgtaacatatgtgcccgctcaagaaaagaatttcactacagcacctgcaatatgtcatgacggaaaagcacattttcctcgggagggagttttcgtttctaatggaacccattggttcgtgacccaaaggaacttttacgagcctcaaataattacaactgataatacattcgtttctggaaattgcgacgtagttataggtattgtaaataatactgtttatgaccctttacaacctgaactcgattccttcaaggaagaactcgacaaatattttaagaatcacacctcaccggacgttgacttaggagacatttccgggattaacgctagtgtagtcaatatccaaaaggagatagatagactgaatgaggtagcaaagaatcttaatgaatctttgatcgaccttcaggagctggggaagtacgaacaatacataaaatggccatggtacatttggagctctattgcctcttttttctttatcatagggttaatcattggactattcttggttctccgagttggtatttatctttgcattaaattaaagcacaccaagaaaagacagatttatacagacatagagatgaaccgacttggaaagtaaaggctagc

SEQ ID NO: 12 - DNA, 3966 bp, Artificial Sequence
  Synthetic: Construct 4: nucleotide sequence of S protein with VSVG-TM-CT IND serotype to be added to Vector B
ttcgaacaactaatatcctgtcttctctatccctatgaaaaaaactaacagagatcgatctgtttccttgacaccaggagccaccatgttcgtgttcctggtgctattacctctggtttcgtctcaatgcgtaaaccttacaactagaactcagcttcctccagcatacacaaattccttcactcgcggagtgtattatcctgataaggtctttcgatcatcagtgttgcattccacccaggatttgtttctcccgttcttttcaaatgtaacttggttccatgctatacatgtttccggaaccaatggaacaaagagatttgataacccagtgttaccatttaacgacggagtttatttcgcatcaactgagaaatccaatatcattagaggctggattttcggaacgaccctggattctaaaacgcaatccttgctgattgttaataatgcaacaaatgtggtcattaaagtctgtgaattccaattttgcaatgatccatttctcggcgtctattaccacaagaataacaaatcttggatggagtcagagttcagggtttatagttccgcaaataattgtacttttgaatacgtttcccaaccattcttaatggacttggagggaaaacagggaaattttaagaatctaagagaattcgtctttaagaatattgatggatatttcaagatctattcaaaacatacacctataaacctagttagagatctcccgcaagggttttcagccctagagccactagttgacctgccaattgggatcaacattactagattccagaccctactcgctctgcatcggtcatatttgacaccaggagattcatcgtcaggatggaccgctggagcagctgcttactatgttgggtatctgcaacctagaacatttctcctaaagtataatgaaaacgggactattacagacgcagtcgattgcgcactggatccactctcagagacaaagtgcactctaaaatcattcactgtcgagaaaggaatctatcaaacatcaaatttcagggtccagccaactgagagtattgtccggttccctaacataactaacttgtgccccttcggagaggttttcaatgctactcggttcgccagcgtctacgcatggaacagaaagaggatttcaaactgtgtcgcagattatagcgtcctctataattcagcatcattcagtacatttaaatgctatggtgtcagccccaccaaacttaatgacttatgttttaccaatgtatatgcagattcctttgtaatcagaggtgacgaagtgaggcaaatcgcacctggacagaccggaaagattgctgattataattataaactccctgatgattttaccggatgtgttattgcttggaacagcaataacctcgatagtaaggtcggaggaaactataactatttgtacagactgtttagaaagtcgaatttgaaaccttttgaaagagacatatccaccgagatttaccaggcgggcagcacaccgtgtaatggtgtagaaggattcaattgttactttcccctgcaatcatatgggtttcaaccaaccaatggagtcggatatcaaccatatcgtgtcgtcgtcctttccttcgagctgcttcatgcaccagctacagtctgcggacctaagaagagcactaatcttgtcaagaacaaatgtgtgaactttaattttaatggattaacaggaaccggagttttgaccgagagtaataagaagttcttgccgttccagcaatttggacgagacattgctgacaccacagatgcggttcgtgacccgcaaactttagagatcctagacatcaccccatgttcattcggtggagtttccgttattactcctggaacgaatacaagcaatcaagttgccgttctctatcaagatgttaattgtacagaagtgcctgtggccattcatgcagatcaactaacaccaacttggagagtttacagcactgggtccaatgtcttccaaacgcgcgccggctgcctcattggtgcagaacatgtgaataactcatacgaatgtgacattccaatcggtgccggcatatgcgcctcttaccagactcagactaattcgccaagaagagccaggtctgtcgcaagtcagtcaattattgcatacacaatgtcgttaggagcagagaatagtgtagcatactcaaacaattctatagcaatacctaccaacttcactatatcagtaactacagaaatattgccagtatccatgactaaaacaagtgtggattgcaccatgtacatctgtggagattccacagaatgcagcaatcttctcttgcaatacggatcattctgcacacaactgaatagggcactgactggaattgcagtcgagcaggataagaacacacaggaggtgtttgcccaagtcaaacaaatatacaaaacaccacccatcaaggattttggaggatttaatttctcacaaatactccccgacccatccaagccctccaaaaggagtttcattgaggacctcttgtttaataaggttaccttggcagatgccgggtttattaagcagtacggcgactgtcttggagacatagcagccagagatctaatttgtgcccagaaattcaatggactgacagtcctgcctcccttattaactgatgagatgatagctcagtatacatcagcattgttggctggtacaattacatctggatggacatttggtgccggagcggcattacaaatcccttttgcaatgcaaatggcctatagatttaatggaatcggagtaactcaaaatgttttatatgagaatcagaaattaattgcaaatcaattcaattcagctataggaaagattcaggattcactcagtagtacagcaagcgctctaggcaaattacaagacgtcgtcaatcagaatgcacaggcattaaatacactggtgaagcaattgagttccaatttcggagcaatttcatctgttctaaatgatatattgtcaagactggataaagtagaagccgaggtccaaatcgataggctgatcacaggaagacttcaatcactacagacatacgtcacccaacaactcatcagagcagcagaaattagagcctctgctaatctagccgcaacaaagatgtcagagtgcgtattgggacaatctaagagggtcgacttttgtggaaaggggtatcacttgatgtcctttcctcaatctgcaccacacggagttgtcttcttacatgtaacatatgtgcccgctcaagaaaagaatttcactacagcacctgcaatatgtcatgacggaaaagcacattttcctcgggagggagttttcgtttctaatggaacccattggttcgtgacccaaaggaacttttacgagcctcaaataattacaactgataatacattcgtttctggaaattgcgacgtagttataggtattgtaaataatactgtttatgaccctttacaacctgaactcgattccttcaaggaagaactcgacaaatattttaagaatcacacctcaccggacgttgacttaggagacatttccgggattaacgctagtgtagtcaatatccaaaaggagatagatagactgaatgaggtagcaaagaatcttaatgaatctttgatcgaccttcaggagctggggaagtacgaacaatacataaaatggccatggtacatttggagctctattgcctcttttttctttatcatagggttaatcattggactattcttggttctccgagttggtatttatctttgcattaaattaaagcacaccaagaaaagacagatttatacagacatagagatgaaccgacttggaaagtaaagctcaaatcctgcacaacagattcttcatgtttgaaccaaatcaacttgtgatatcatgctcaaagaggccttaattaa

SEQ ID NO: 13 - protein, 1260 aa, Artificial Sequence
  Synthetic: Construct 5: S protein with MPER6aa and VSVG-TM-CT IND serotype
MFVFLVLLPLVSSQCVNLTTRTQLPPAYTNSFTRGVYYPDKVFRSSVLHSTQDLFLPFFSNVTWFHAIHVSGTNGTKRFDNPVLPFNDGVYFASTEKSNIIRGWIFGTTLDSKTQSLLIVNNATNVVIKVCEFQFCNDPFLGVYYHKNNKSWMESEFRVYSSANNCTFEYVSQPFLMDLEGKQGNFKNLREFVFKNIDGYFKIYSKHTPINLVRDLPQGFSALEPLVDLPIGINITRFQTLLALHRSYLTPGDSSSGWTAGAAAYYVGYLQPRTFLLKYNENGTITDAVDCALDPLSETKCTLKSFTVEKGIYQTSNFRVQPTESIVRFPNITNLCPFGEVFNATRFASVYAWNRKRISNCVADYSVLYNSASFSTFKCYGVSPTKLNDLCFTNVYADSFVIRGDEVRQIAPGQTGKIADYNYKLPDDFTGCVIAWNSNNLDSKVGGNYNYLYRLFRKSNLKPFERDISTEIYQAGSTPCNGVEGFNCYFPLQSYGFQPTNGVGYQPYRVVVLSFELLHAPATVCGPKKSTNLVKNKCVNFNFNGLTGTGVLTESNKKFLPFQQFGRDIADTTDAVRDPQTLEILDITPCSFGGVSVITPGTNTSNQVAVLYQDVNCTEVPVAIHADQLTPTWRVYSTGSNVFQTRAGCLIGAEHVNNSYECDIPIGAGICASYQTQTNSPRRARSVASQSIIAYTMSLGAENSVAYSNNSIAIPTNFTISVTTEILPVSMTKTSVDCTMYICGDSTECSNLLLQYGSFCTQLNRALTGIAVEQDKNTQEVFAQVKQIYKTPPIKDFGGFNFSQILPDPSKPSKRSFIEDLLFNKVTLADAGFIKQYGDCLGDIAARDLICAQKFNGLTVLPPLLTDEMIAQYTSALLAGTITSGWTFGAGAALQIPFAMQMAYRFNGIGVTQNVLYENQKLIANQFNSAIGKIQDSLSSTASALGKLQDVVNQNAQALNTLVKQLSSNFGAISSVLNDILSRLDKVEAEVQIDRLITGRLQSLQTYVTQQLIRAAEIRASANLAATKMSECVLGQSKRVDFCGKGYHLMSFPQSAPHGVVFLHVTYVPAQEKNFTTAPAICHDGKAHFPREGVFVSNGTHWFVTQRNFYEPQIITTDNTFVSGNCDVVIGIVNNTVYDPLQPELDSFKEELDKYFKNHTSPDVDLGDISGINASVVNIQKEIDRLNEVAKNLNESLIDLQELGKYEQYIKSSIASFFFIIGLIIGLFLVLRVGIYLCIKLKHTKKRQIYTDIEMNRLGK

SEQ ID NO: 14 - DNA, 3807 bp, Artificial Sequence
  Synthetic: Construct 5: nucleotide sequence of S protein with MPER6aa and VSVG-TM-CT IND serotype
ctcgagaggagccaccatgttcgtgttcctggtgctattacctctggtttcgtctcaatgcgtaaaccttacaactagaactcagcttcctccagcatacacaaattccttcactcgcggagtgtattatcctgataaggtctttcgatcatcagtgttgcattccacccaggatttgtttctcccgttcttttcaaatgtaacttggttccatgctatacatgtttccggaaccaatggaacaaagagatttgataacccagtgttaccatttaacgacggagtttatttcgcatcaactgagaaatccaatatcattagaggctggattttcggaacgaccctggattctaaaacgcaatccttgctgattgttaataatgcaacaaatgtggtcattaaagtctgtgaattccaattttgcaatgatccatttctcggcgtctattaccacaagaataacaaatcttggatggagtcagagttcagggtttatagttccgcaaataattgtacttttgaatacgtttcccaaccattcttaatggacttggagggaaaacagggaaattttaagaatctaagagaattcgtctttaagaatattgatggatatttcaagatctattcaaaacatacacctataaacctagttagagatctcccgcaagggttttcagccctagagccactagttgacctgccaattgggatcaacattactagattccagaccctactcgctctgcatcggtcatatttgacaccaggagattcatcgtcaggatggaccgctggagcagctgcttactatgttgggtatctgcaacctagaacatttctcctaaagtataatgaaaacgggactattacagacgcagtcgattgcgcactggatccactctcagagacaaagtgcactctaaaatcattcactgtcgagaaaggaatctatcaaacatcaaatttcagggtccagccaactgagagtattgtccggttccctaacataactaacttgtgccccttcggagaggttttcaatgctactcggttcgccagcgtctacgcatggaacagaaagaggatttcaaactgtgtcgcagattatagcgtcctctataattcagcatcattcagtacatttaaatgctatggtgtcagccccaccaaacttaatgacttatgttttaccaatgtatatgcagattcctttgtaatcagaggtgacgaagtgaggcaaatcgcacctggacagaccggaaagattgctgattataattataaactccctgatgattttaccggatgtgttattgcttggaacagcaataacctcgatagtaaggtcggaggaaactataactatttgtacagactgtttagaaagtcgaatttgaaaccttttgaaagagacatatccaccgagatttaccaggcgggcagcacaccgtgtaatggtgtagaaggattcaattgttactttcccctgcaatcatatgggtttcaaccaaccaatggagtcggatatcaaccatatcgtgtcgtcgtcctttccttcgagctgcttcatgcaccagctacagtctgcggacctaagaagagcactaatcttgtcaagaacaaatgtgtgaactttaattttaatggattaacaggaaccggagttttgaccgagagtaataagaagttcttgccgttccagcaatttggacgagacattgctgacaccacagatgcggttcgtgacccgcaaactttagagatcctagacatcaccccatgttcattcggtggagtttccgttattactcctggaacgaatacaagcaatcaagttgccgttctctatcaagatgttaattgtacagaagtgcctgtggccattcatgcagatcaactaacaccaacttggagagtttacagcactgggtccaatgtcttccaaacgcgcgccggctgcctcattggtgcagaacatgtgaataactcatacgaatgtgacattccaatcggtgccggcatatgcgcctcttaccagactcagactaattcgccaagaagagccaggtctgtcgcaagtcagtcaattattgcatacacaatgtcgttaggagcagagaatagtgtagcatactcaaacaattctatagcaatacctaccaacttcactatatcagtaactacagaaatattgccagtatccatgactaaaacaagtgtggattgcaccatgtacatctgtggagattccacagaatgcagcaatcttctcttgcaatacggatcattctgcacacaactgaatagggcactgactggaattgcagtcgagcaggataagaacacacaggaggtgtttgcccaagtcaaacaaatatacaaaacaccacccatcaaggattttggaggatttaatttctcacaaatactccccgacccatccaagccctccaaaaggagtttcattgaggacctcttgtttaataaggttaccttggcagatgccgggtttattaagcagtacggcgactgtcttggagacatagcagccagagatctaatttgtgcccagaaattcaatggactgacagtcctgcctcccttattaactgatgagatgatagctcagtatacatcagcattgttggctggtacaattacatctggatggacatttggtgccggagcggcattacaaatcccttttgcaatgcaaatggcctatagatttaatggaatcggagtaactcaaaatgttttatatgagaatcagaaattaattgcaaatcaattcaattcagctataggaaagattcaggattcactcagtagtacagcaagcgctctaggcaaattacaagacgtcgtcaatcagaatgcacaggcattaaatacactggtgaagcaattgagttccaatttcggagcaatttcatctgttctaaatgatatattgtcaagactggataaagtagaagccgaggtccaaatcgataggctgatcacaggaagacttcaatcactacagacatacgtcacccaacaactcatcagagcagcagaaattagagcctctgctaatctagccgcaacaaagatgtcagagtgcgtattgggacaatctaagagggtcgacttttgtggaaaggggtatcacttgatgtcctttcctcaatctgcaccacacggagttgtcttcttacatgtaacatatgtgcccgctcaagaaaagaatttcactacagcacctgcaatatgtcatgacggaaaagcacattttcctcgggagggagttttcgtttctaatggaacccattggttcgtgacccaaaggaacttttacgagcctcaaataattacaactgataatacattcgtttctggaaattgcgacgtagttataggtattgtaaataatactgtttatgaccctttacaacctgaactcgattccttcaaggaagaactcgacaaatattttaagaatcacacctcaccggacgttgacttaggagacatttccgggattaacgctagtgtagtcaatatccaaaaggagatagatagactgaatgaggtagcaaagaatcttaatgaatctttgatcgaccttcaggagctggggaagtacgaacaatacataaaaagctctattgcctcttttttctttatcatagggttaatcattggactattcttggttctccgagttggtatttatctttgcattaaattaaagcacaccaagaaaagacagatttatacagacatagagatgaaccgacttggaaagtaaaggctagc

SEQ ID NO: 15 - DNA, 3948 bp, Artificial Sequence
  Synthetic: Construct 5: nucleotide sequence of S protein with MPER6aa and VSVG-TM-CT IND serotype
ttcgaacaactaatatcctgtcttctctatccctatgaaaaaaactaacagagatcgatctgtttccttgacaccaggagccaccatgttcgtgttcctggtgctattacctctggtttcgtctcaatgcgtaaaccttacaactagaactcagcttcctccagcatacacaaattccttcactcgcggagtgtattatcctgataaggtctttcgatcatcagtgttgcattccacccaggatttgtttctcccgttcttttcaaatgtaacttggttccatgctatacatgtttccggaaccaatggaacaaagagatttgataacccagtgttaccatttaacgacggagtttatttcgcatcaactgagaaatccaatatcattagaggctggattttcggaacgaccctggattctaaaacgcaatccttgctgattgttaataatgcaacaaatgtggtcattaaagtctgtgaattccaattttgcaatgatccatttctcggcgtctattaccacaagaataacaaatcttggatggagtcagagttcagggtttatagttccgcaaataattgtacttttgaatacgtttcccaaccattcttaatggacttggagggaaaacagggaaattttaagaatctaagagaattcgtctttaagaatattgatggatatttcaagatctattcaaaacatacacctataaacctagttagagatctcccgcaagggttttcagccctagagccactagttgacctgccaattgggatcaacattactagattccagaccctactcgctctgcatcggtcatatttgacaccaggagattcatcgtcaggatggaccgctggagcagctgcttactatgttgggtatctgcaacctagaacatttctcctaaagtataatgaaaacgggactattacagacgcagtcgattgcgcactggatccactctcagagacaaagtgcactctaaaatcattcactgtcgagaaaggaatctatcaaacatcaaatttcagggtccagccaactgagagtattgtccggttccctaacataactaacttgtgccccttcggagaggttttcaatgctactcggttcgccagcgtctacgcatggaacagaaagaggatttcaaactgtgtcgcagattatagcgtcctctataattcagcatcattcagtacatttaaatgctatggtgtcagccccaccaaacttaatgacttatgttttaccaatgtatatgcagattcctttgtaatcagaggtgacgaagtgaggcaaatcgcacctggacagaccggaaagattgctgattataattataaactccctgatgattttaccggatgtgttattgcttggaacagcaataacctcgatagtaaggtcggaggaaactataactatttgtacagactgtttagaaagtcgaatttgaaaccttttgaaagagacatatccaccgagatttaccaggcgggcagcacaccgtgtaatggtgtagaaggattcaattgttactttcccctgcaatcatatgggtttcaaccaaccaatggagtcggatatcaaccatatcgtgtcgtcgtcctttccttcgagctgcttcatgcaccagctacagtctgcggacctaagaagagcactaatcttgtcaagaacaaatgtgtgaactttaattttaatggattaacaggaaccggagttttgaccgagagtaataagaagttcttgccgttccagcaatttggacgagacattgctgacaccacagatgcggttcgtgacccgcaaactttagagatcctagacatcaccccatgttcattcggtggagtttccgttattactcctggaacgaatacaagcaatcaagttgccgttctctatcaagatgttaattgtacagaagtgcctgtggccattcatgcagatcaactaacaccaacttggagagtttacagcactgggtccaatgtcttccaaacgcgcgccggctgcctcattggtgcagaacatgtgaataactcatacgaatgtgacattccaatcggtgccggcatatgcgcctcttaccagactcagactaattcgccaagaagagccaggtctgtcgcaagtcagtcaattattgcatacacaatgtcgttaggagcagagaatagtgtagcatactcaaacaattctatagcaatacctaccaacttcactatatcagtaactacagaaatattgccagtatccatgactaaaacaagtgtggattgcaccatgtacatctgtggagattccacagaatgcagcaatcttctcttgcaatacggatcattctgcacacaactgaatagggcactgactggaattgcagtcgagcaggataagaacacacaggaggtgtttgcccaagtcaaacaaatatacaaaacaccacccatcaaggattttggaggatttaatttctcacaaatactccccgacccatccaagccctccaaaaggagtttcattgaggacctcttgtttaataaggttaccttggcagatgccgggtttattaagcagtacggcgactgtcttggagacatagcagccagagatctaatttgtgcccagaaattcaatggactgacagtcctgcctcccttattaactgatgagatgatagctcagtatacatcagcattgttggctggtacaattacatctggatggacatttggtgccggagcggcattacaaatcccttttgcaatgcaaatggcctatagatttaatggaatcggagtaactcaaaatgttttatatgagaatcagaaattaattgcaaatcaattcaattcagctataggaaagattcaggattcactcagtagtacagcaagcgctctaggcaaattacaagacgtcgtcaatcagaatgcacaggcattaaatacactggtgaagcaattgagttccaatttcggagcaatttcatctgttctaaatgatatattgtcaagactggataaagtagaagccgaggtccaaatcgataggctgatcacaggaagacttcaatcactacagacatacgtcacccaacaactcatcagagcagcagaaattagagcctctgctaatctagccgcaacaaagatgtcagagtgcgtattgggacaatctaagagggtcgacttttgtggaaaggggtatcacttgatgtcctttcctcaatctgcaccacacggagttgtcttcttacatgtaacatatgtgcccgctcaagaaaagaatttcactacagcacctgcaatatgtcatgacggaaaagcacattttcctcgggagggagttttcgtttctaatggaacccattggttcgtgacccaaaggaacttttacgagcctcaaataattacaactgataatacattcgtttctggaaattgcgacgtagttataggtattgtaaataatactgtttatgaccctttacaacctgaactcgattccttcaaggaagaactcgacaaatattttaagaatcacacctcaccggacgttgacttaggagacatttccgggattaacgctagtgtagtcaatatccaaaaggagatagatagactgaatgaggtagcaaagaatcttaatgaatctttgatcgaccttcaggagctggggaagtacgaacaatacataaaaagctctattgcctcttttttctttatcatagggttaatcattggactattcttggttctccgagttggtatttatctttgcattaaattaaagcacaccaagaaaagacagatttatacagacatagagatgaaccgacttggaaagtaaagctcaaatcctgcacaacagattcttcatgtttgaaccaaatcaacttgtgatatcatgctcaaagaggccttaattaa

SEQ ID NO: 16 - protein, 1252 aa, Artificial Sequence
  Synthetic: Construct 6: S protein with dCt21
MFVFLVLLPLVSSQCVNLTTRTQLPPAYTNSFTRGVYYPDKVFRSSVLHSTQDLFLPFFSNVTWFHAIHVSGTNGTKRFDNPVLPFNDGVYFASTEKSNIIRGWIFGTTLDSKTQSLLIVNNATNVVIKVCEFQFCNDPFLGVYYHKNNKSWMESEFRVYSSANNCTFEYVSQPFLMDLEGKQGNFKNLREFVFKNIDGYFKIYSKHTPINLVRDLPQGFSALEPLVDLPIGINITRFQTLLALHRSYLTPGDSSSGWTAGAAAYYVGYLQPRTFLLKYNENGTITDAVDCALDPLSETKCTLKSFTVEKGIYQTSNFRVQPTESIVRFPNITNLCPFGEVFNATRFASVYAWNRKRISNCVADYSVLYNSASFSTFKCYGVSPTKLNDLCFTNVYADSFVIRGDEVRQIAPGQTGKIADYNYKLPDDFTGCVIAWNSNNLDSKVGGNYNYLYRLFRKSNLKPFERDISTEIYQAGSTPCNGVEGFNCYFPLQSYGFQPTNGVGYQPYRVVVLSFELLHAPATVCGPKKSTNLVKNKCVNFNFNGLTGTGVLTESNKKFLPFQQFGRDIADTTDAVRDPQTLEILDITPCSFGGVSVITPGTNTSNQVAVLYQDVNCTEVPVAIHADQLTPTWRVYSTGSNVFQTRAGCLIGAEHVNNSYECDIPIGAGICASYQTQTNSPRRARSVASQSIIAYTMSLGAENSVAYSNNSIAIPTNFTISVTTEILPVSMTKTSVDCTMYICGDSTECSNLLLQYGSFCTQLNRALTGIAVEQDKNTQEVFAQVKQIYKTPPIKDFGGFNFSQILPDPSKPSKRSFIEDLLFNKVTLADAGFIKQYGDCLGDIAARDLICAQKFNGLTVLPPLLTDEMIAQYTSALLAGTITSGWTFGAGAALQIPFAMQMAYRFNGIGVTQNVLYENQKLIANQFNSAIGKIQDSLSSTASALGKLQDVVNQNAQALNTLVKQLSSNFGAISSVLNDILSRLDKVEAEVQIDRLITGRLQSLQTYVTQQLIRAAEIRASANLAATKMSECVLGQSKRVDFCGKGYHLMSFPQSAPHGVVFLHVTYVPAQEKNFTTAPAICHDGKAHFPREGVFVSNGTHWFVTQRNFYEPQIITTDNTFVSGNCDVVIGIVNNTVYDPLQPELDSFKEELDKYFKNHTSPDVDLGDISGINASVVNIQKEIDRLNEVAKNLNESLIDLQELGKYEQYIKWPWYIWLGFIAGLIAIVMVTIMLCCMTSCCSCLKGCCSCGS

SEQ ID NO: 17 - DNA, 3783 bp, Artificial Sequence
  Synthetic: Construct 6: Nucleotide sequence of S protein with dCt21 to be added Vector A
ctcgagaggagccaccatgttcgtgttcctggtgctattacctctggtttcgtctcaatgcgtaaaccttacaactagaactcagcttcctccagcatacacaaattccttcactcgcggagtgtattatcctgataaggtctttcgatcatcagtgttgcattccacccaggatttgtttctcccgttcttttcaaatgtaacttggttccatgctatacatgtttccggaaccaatggaacaaagagatttgataacccagtgttaccatttaacgacggagtttatttcgcatcaactgagaaatccaatatcattagaggctggattttcggaacgaccctggattctaaaacgcaatccttgctgattgttaataatgcaacaaatgtggtcattaaagtctgtgaattccaattttgcaatgatccatttctcggcgtctattaccacaagaataacaaatcttggatggagtcagagttcagggtttatagttccgcaaataattgtacttttgaatacgtttcccaaccattcttaatggacttggagggaaaacagggaaattttaagaatctaagagaattcgtctttaagaatattgatggatatttcaagatctattcaaaacatacacctataaacctagttagagatctcccgcaagggttttcagccctagagccactagttgacctgccaattgggatcaacattactagattccagaccctactcgctctgcatcggtcatatttgacaccaggagattcatcgtcaggatggaccgctggagcagctgcttactatgttgggtatctgcaacctagaacatttctcctaaagtataatgaaaacgggactattacagacgcagtcgattgcgcactggatccactctcagagacaaagtgcactctaaaatcattcactgtcgagaaaggaatctatcaaacatcaaatttcagggtccagccaactgagagtattgtccggttccctaacataactaacttgtgccccttcggagaggttttcaatgctactcggttcgccagcgtctacgcatggaacagaaagaggatttcaaactgtgtcgcagattatagcgtcctctataattcagcatcattcagtacatttaaatgctatggtgtcagccccaccaaacttaatgacttatgttttaccaatgtatatgcagattcctttgtaatcagaggtgacgaagtgaggcaaatcgcacctggacagaccggaaagattgctgattataattataaactccctgatgattttaccggatgtgttattgcttggaacagcaataacctcgatagtaaggtcggaggaaactataactatttgtacagactgtttagaaagtcgaatttgaaaccttttgaaagagacatatccaccgagatttaccaggcgggcagcacaccgtgtaatggtgtagaaggattcaattgttactttcccctgcaatcatatgggtttcaaccaaccaatggagtcggatatcaaccatatcgtgtcgtcgtcctttccttcgagctgcttcatgcaccagctacagtctgcggacctaagaagagcactaatcttgtcaagaacaaatgtgtgaactttaattttaatggattaacaggaaccggagttttgaccgagagtaataagaagttcttgccgttccagcaatttggacgagacattgctgacaccacagatgcggttcgtgacccgcaaactttagagatcctagacatcaccccatgttcattcggtggagtttccgttattactcctggaacgaatacaagcaatcaagttgccgttctctatcaagatgttaattgtacagaagtgcctgtggccattcatgcagatcaactaacaccaacttggagagtttacagcactgggtccaatgtcttccaaacgcgcgccggctgcctcattggtgcagaacatgtgaataactcatacgaatgtgacattccaatcggtgccggcatatgcgcctcttaccagactcagactaattcgccaagaagagccaggtctgtcgcaagtcagtcaattattgcatacacaatgtcgttaggagcagagaatagtgtagcatactcaaacaattctatagcaatacctaccaacttcactatatcagtaactacagaaatattgccagtatccatgactaaaacaagtgtggattgcaccatgtacatctgtggagattccacagaatgcagcaatcttctcttgcaatacggatcattctgcacacaactgaatagggcactgactggaattgcagtcgagcaggataagaacacacaggaggtgtttgcccaagtcaaacaaatatacaaaacaccacccatcaaggattttggaggatttaatttctcacaaatactccccgacccatccaagccctccaaaaggagtttcattgaggacctcttgtttaataaggttaccttggcagatgccgggtttattaagcagtacggcgactgtcttggagacatagcagccagagatctaatttgtgcccagaaattcaatggactgacagtcctgcctcccttattaactgatgagatgatagctcagtatacatcagcattgttggctggtacaattacatctggatggacatttggtgccggagcggcattacaaatcccttttgcaatgcaaatggcctatagatttaatggaatcggagtaactcaaaatgttttatatgagaatcagaaattaattgcaaatcaattcaattcagctataggaaagattcaggattcactcagtagtacagcaagcgctctaggcaaattacaagacgtcgtcaatcagaatgcacaggcattaaatacactggtgaagcaattgagttccaatttcggagcaatttcatctgttctaaatgatatattgtcaagactggataaagtagaagccgaggtccaaatcgataggctgatcacaggaagacttcaatcactacagacatacgtcacccaacaactcatcagagcagcagaaattagagcctctgctaatctagccgcaacaaagatgtcagagtgcgtattgggacaatctaagagggtcgacttttgtggaaaggggtatcacttgatgtcctttcctcaatctgcaccacacggagttgtcttcttacatgtaacatatgtgcccgctcaagaaaagaatttcactacagcacctgcaatatgtcatgacggaaaagcacattttcctcgggagggagttttcgtttctaatggaacccattggttcgtgacccaaaggaacttttacgagcctcaaataattacaactgataatacattcgtttctggaaattgcgacgtagttataggtattgtaaataatactgtttatgaccctttacaacctgaactcgattccttcaaggaagaactcgacaaatattttaagaatcacacctcaccggacgttgacttaggagacatttccgggattaacgctagtgtagtcaatatccaaaaggagatagatagactgaatgaggtagcaaagaatcttaatgaatctttgatcgaccttcaggagctggggaagtacgaacaatacataaaatggccatggtacatttggctcgggtttattgctggactaattgcaatagtcatggtcactatcatgctgtgttgtatgacatcgtgctgctcatgcctcaagggatgttgtagctgtggatcttaaaggctagc

SEQ ID NO: 18 - DNA, 3924 bp, Artificial Sequence
  Synthetic: Construct 6: Nucleotide sequence of S protein with dCt21 to be added Vector B
ttcgaacaactaatatcctgtcttctctatccctatgaaaaaaactaacagagatcgatctgtttccttgacaccaggagccaccatgttcgtgttcctggtgctattacctctggtttcgtctcaatgcgtaaaccttacaactagaactcagcttcctccagcatacacaaattccttcactcgcggagtgtattatcctgataaggtctttcgatcatcagtgttgcattccacccaggatttgtttctcccgttcttttcaaatgtaacttggttccatgctatacatgtttccggaaccaatggaacaaagagatttgataacccagtgttaccatttaacgacggagtttatttcgcatcaactgagaaatccaatatcattagaggctggattttcggaacgaccctggattctaaaacgcaatccttgctgattgttaataatgcaacaaatgtggtcattaaagtctgtgaattccaattttgcaatgatccatttctcggcgtctattaccacaagaataacaaatcttggatggagtcagagttcagggtttatagttccgcaaataattgtacttttgaatacgtttcccaaccattcttaatggacttggagggaaaacagggaaattttaagaatctaagagaattcgtctttaagaatattgatggatatttcaagatctattcaaaacatacacctataaacctagttagagatctcccgcaagggttttcagccctagagccactagttgacctgccaattgggatcaacattactagattccagaccctactcgctctgcatcggtcatatttgacaccaggagattcatcgtcaggatggaccgctggagcagctgcttactatgttgggtatctgcaacctagaacatttctcctaaagtataatgaaaacgggactattacagacgcagtcgattgcgcactggatccactctcagagacaaagtgcactctaaaatcattcactgtcgagaaaggaatctatcaaacatcaaatttcagggtccagccaactgagagtattgtccggttccctaacataactaacttgtgccccttcggagaggttttcaatgctactcggttcgccagcgtctacgcatggaacagaaagaggatttcaaactgtgtcgcagattatagcgtcctctataattcagcatcattcagtacatttaaatgctatggtgtcagccccaccaaacttaatgacttatgttttaccaatgtatatgcagattcctttgtaatcagaggtgacgaagtgaggcaaatcgcacctggacagaccggaaagattgctgattataattataaactccctgatgattttaccggatgtgttattgcttggaacagcaataacctcgatagtaaggtcggaggaaactataactatttgtacagactgtttagaaagtcgaatttgaaaccttttgaaagagacatatccaccgagatttaccaggcgggcagcacaccgtgtaatggtgtagaaggattcaattgttactttcccctgcaatcatatgggtttcaaccaaccaatggagtcggatatcaaccatatcgtgtcgtcgtcctttccttcgagctgcttcatgcaccagctacagtctgcggacctaagaagagcactaatcttgtcaagaacaaatgtgtgaactttaattttaatggattaacaggaaccggagttttgaccgagagtaataagaagttcttgccgttccagcaatttggacgagacattgctgacaccacagatgcggttcgtgacccgcaaactttagagatcctagacatcaccccatgttcattcggtggagtttccgttattactcctggaacgaatacaagcaatcaagttgccgttctctatcaagatgttaattgtacagaagtgcctgtggccattcatgcagatcaactaacaccaacttggagagtttacagcactgggtccaatgtcttccaaacgcgcgccggctgcctcattggtgcagaacatgtgaataactcatacgaatgtgacattccaatcggtgccggcatatgcgcctcttaccagactcagactaattcgccaagaagagccaggtctgtcgcaagtcagtcaattattgcatacacaatgtcgttaggagcagagaatagtgtagcatactcaaacaattctatagcaatacctaccaacttcactatatcagtaactacagaaatattgccagtatccatgactaaaacaagtgtggattgcaccatgtacatctgtggagattccacagaatgcagcaatcttctcttgcaatacggatcattctgcacacaactgaatagggcactgactggaattgcagtcgagcaggataagaacacacaggaggtgtttgcccaagtcaaacaaatatacaaaacaccacccatcaaggattttggaggatttaatttctcacaaatactccccgacccatccaagccctccaaaaggagtttcattgaggacctcttgtttaataaggttaccttggcagatgccgggtttattaagcagtacggcgactgtcttggagacatagcagccagagatctaatttgtgcccagaaattcaatggactgacagtcctgcctcccttattaactgatgagatgatagctcagtatacatcagcattgttggctggtacaattacatctggatggacatttggtgccggagcggcattacaaatcccttttgcaatgcaaatggcctatagatttaatggaatcggagtaactcaaaatgttttatatgagaatcagaaattaattgcaaatcaattcaattcagctataggaaagattcaggattcactcagtagtacagcaagcgctctaggcaaattacaagacgtcgtcaatcagaatgcacaggcattaaatacactggtgaagcaattgagttccaatttcggagcaatttcatctgttctaaatgatatattgtcaagactggataaagtagaagccgaggtccaaatcgataggctgatcacaggaagacttcaatcactacagacatacgtcacccaacaactcatcagagcagcagaaattagagcctctgctaatctagccgcaacaaagatgtcagagtgcgtattgggacaatctaagagggtcgacttttgtggaaaggggtatcacttgatgtcctttcctcaatctgcaccacacggagttgtcttcttacatgtaacatatgtgcccgctcaagaaaagaatttcactacagcacctgcaatatgtcatgacggaaaagcacattttcctcgggagggagttttcgtttctaatggaacccattggttcgtgacccaaaggaacttttacgagcctcaaataattacaactgataatacattcgtttctggaaattgcgacgtagttataggtattgtaaataatactgtttatgaccctttacaacctgaactcgattccttcaaggaagaactcgacaaatattttaagaatcacacctcaccggacgttgacttaggagacatttccgggattaacgctagtgtagtcaatatccaaaaggagatagatagactgaatgaggtagcaaagaatcttaatgaatctttgatcgaccttcaggagctggggaagtacgaacaatacataaaatggccatggtacatttggctcgggtttattgctggactaattgcaatagtcatggtcactatcatgctgtgttgtatgacatcgtgctgctcatgcctcaagggatgttgtagctgtggatcttaaagctcaaatcctgcacaacagattcttcatgtttgaaccaaatcaacttgtgatatcatgctcaaagaggccttaattaa

SEQ ID NO: 19 - protein, 1283 aa, Artificial Sequence
  Synthetic: Construct 7: S protein with dCt19 and VSVGct
MFVFLVLLPLVSSQCVNLTTRTQLPPAYTNSFTRGVYYPDKVFRSSVLHSTQDLFLPFFSNVTWFHAIHVSGTNGTKRFDNPVLPFNDGVYFASTEKSNIIRGWIFGTTLDSKTQSLLIVNNATNVVIKVCEFQFCNDPFLGVYYHKNNKSWMESEFRVYSSANNCTFEYVSQPFLMDLEGKQGNFKNLREFVFKNIDGYFKIYSKHTPINLVRDLPQGFSALEPLVDLPIGINITRFQTLLALHRSYLTPGDSSSGWTAGAAAYYVGYLQPRTFLLKYNENGTITDAVDCALDPLSETKCTLKSFTVEKGIYQTSNFRVQPTESIVRFPNITNLCPFGEVFNATRFASVYAWNRKRISNCVADYSVLYNSASFSTFKCYGVSPTKLNDLCFTNVYADSFVIRGDEVRQIAPGQTGKIADYNYKLPDDFTGCVIAWNSNNLDSKVGGNYNYLYRLFRKSNLKPFERDISTEIYQAGSTPCNGVEGFNCYFPLQSYGFQPTNGVGYQPYRVVVLSFELLHAPATVCGPKKSTNLVKNKCVNFNFNGLTGTGVLTESNKKFLPFQQFGRDIADTTDAVRDPQTLEILDITPCSFGGVSVITPGTNTSNQVAVLYQDVNCTEVPVAIHADQLTPTWRVYSTGSNVFQTRAGCLIGAEHVNNSYECDIPIGAGICASYQTQTNSPRRARSVASQSIIAYTMSLGAENSVAYSNNSIAIPTNFTISVTTEILPVSMTKTSVDCTMYICGDSTECSNLLLQYGSFCTQLNRALTGIAVEQDKNTQEVFAQVKQIYKTPPIKDFGGFNFSQILPDPSKPSKRSFIEDLLFNKVTLADAGFIKQYGDCLGDIAARDLICAQKFNGLTVLPPLLTDEMIAQYTSALLAGTITSGWTFGAGAALQIPFAMQMAYRFNGIGVTQNVLYENQKLIANQFNSAIGKIQDSLSSTASALGKLQDVVNQNAQALNTLVKQLSSNFGAISSVLNDILSRLDKVEAEVQIDRLITGRLQSLQTYVTQQLIRAAEIRASANLAATKMSECVLGQSKRVDFCGKGYHLMSFPQSAPHGVVFLHVTYVPAQEKNFTTAPAICHDGKAHFPREGVFVSNGTHWFVTQRNFYEPQIITTDNTFVSGNCDVVIGIVNNTVYDPLQPELDSFKEELDKYFKNHTSPDVDLGDISGINASVVNIQKEIDRLNEVAKNLNESLIDLQELGKYEQYIKWPWYIWLGFIAGLIAIVMVTIMLCCMTSCCSCLKGCCSCGSCCRVGIYLCIKLKHTKKRQIYTDIEMNRLGK

SEQ ID NO: 20 - DNA, 3876 bp, Artificial Sequence
  Synthetic: Construct 7: Nucleotide sequence of S protein with dCt19 and VSGct to be added Vector A
ctcgagaggagccaccatgttcgtgttcctggtgctattacctctggtttcgtctcaatgcgtaaaccttacaactagaactcagcttcctccagcatacacaaattccttcactcgcggagtgtattatcctgataaggtctttcgatcatcagtgttgcattccacccaggatttgtttctcccgttcttttcaaatgtaacttggttccatgctatacatgtttccggaaccaatggaacaaagagatttgataacccagtgttaccatttaacgacggagtttatttcgcatcaactgagaaatccaatatcattagaggctggattttcggaacgaccctggattctaaaacgcaatccttgctgattgttaataatgcaacaaatgtggtcattaaagtctgtgaattccaattttgcaatgatccatttctcggcgtctattaccacaagaataacaaatcttggatggagtcagagttcagggtttatagttccgcaaataattgtacttttgaatacgtttcccaaccattcttaatggacttggagggaaaacagggaaattttaagaatctaagagaattcgtctttaagaatattgatggatatttcaagatctattcaaaacatacacctataaacctagttagagatctcccgcaagggttttcagccctagagccactagttgacctgccaattgggatcaacattactagattccagaccctactcgctctgcatcggtcatatttgacaccaggagattcatcgtcaggatggaccgctggagcagctgcttactatgttgggtatctgcaacctagaacatttctcctaaagtataatgaaaacgggactattacagacgcagtcgattgcgcactggatccactctcagagacaaagtgcactctaaaatcattcactgtcgagaaaggaatctatcaaacatcaaatttcagggtccagccaactgagagtattgtccggttccctaacataactaacttgtgccccttcggagaggttttcaatgctactcggttcgccagcgtctacgcatggaacagaaagaggatttcaaactgtgtcgcagattatagcgtcctctataattcagcatcattcagtacatttaaatgctatggtgtcagccccaccaaacttaatgacttatgttttaccaatgtatatgcagattcctttgtaatcagaggtgacgaagtgaggcaaatcgcacctggacagaccggaaagattgctgattataattataaactccctgatgattttaccggatgtgttattgcttggaacagcaataacctcgatagtaaggtcggaggaaactataactatttgtacagactgtttagaaagtcgaatttgaaaccttttgaaagagacatatccaccgagatttaccaggcgggcagcacaccgtgtaatggtgtagaaggattcaattgttactttcccctgcaatcatatgggtttcaaccaaccaatggagtcggatatcaaccatatcgtgtcgtcgtcctttccttcgagctgcttcatgcaccagctacagtctgcggacctaagaagagcactaatcttgtcaagaacaaatgtgtgaactttaattttaatggattaacaggaaccggagttttgaccgagagtaataagaagttcttgccgttccagcaatttggacgagacattgctgacaccacagatgcggttcgtgacccgcaaactttagagatcctagacatcaccccatgttcattcggtggagtttccgttattactcctggaacgaatacaagcaatcaagttgccgttctctatcaagatgttaattgtacagaagtgcctgtggccattcatgcagatcaactaacaccaacttggagagtttacagcactgggtccaatgtcttccaaacgcgcgccggctgcctcattggtgcagaacatgtgaataactcatacgaatgtgacattccaatcggtgccggcatatgcgcctcttaccagactcagactaattcgccaagaagagccaggtctgtcgcaagtcagtcaattattgcatacacaatgtcgttaggagcagagaatagtgtagcatactcaaacaattctatagcaatacctaccaacttcactatatcagtaactacagaaatattgccagtatccatgactaaaacaagtgtggattgcaccatgtacatctgtggagattccacagaatgcagcaatcttctcttgcaatacggatcattctgcacacaactgaatagggcactgactggaattgcagtcgagcaggataagaacacacaggaggtgtttgcccaagtcaaacaaatatacaaaacaccacccatcaaggattttggaggatttaatttctcacaaatactccccgacccatccaagccctccaaaaggagtttcattgaggacctcttgtttaataaggttaccttggcagatgccgggtttattaagcagtacggcgactgtcttggagacatagcagccagagatctaatttgtgcccagaaattcaatggactgacagtcctgcctcccttattaactgatgagatgatagctcagtatacatcagcattgttggctggtacaattacatctggatggacatttggtgccggagcggcattacaaatcccttttgcaatgcaaatggcctatagatttaatggaatcggagtaactcaaaatgttttatatgagaatcagaaattaattgcaaatcaattcaattcagctataggaaagattcaggattcactcagtagtacagcaagcgctctaggcaaattacaagacgtcgtcaatcagaatgcacaggcattaaatacactggtgaagcaattgagttccaatttcggagcaatttcatctgttctaaatgatatattgtcaagactggataaagtagaagccgaggtccaaatcgataggctgatcacaggaagacttcaatcactacagacatacgtcacccaacaactcatcagagcagcagaaattagagcctctgctaatctagccgcaacaaagatgtcagagtgcgtattgggacaatctaagagggtcgacttttgtggaaaggggtatcacttgatgtcctttcctcaatctgcaccacacggagttgtcttcttacatgtaacatatgtgcccgctcaagaaaagaatttcactacagcacctgcaatatgtcatgacggaaaagcacattttcctcgggagggagttttcgtttctaatggaacccattggttcgtgacccaaaggaacttttacgagcctcaaataattacaactgataatacattcgtttctggaaattgcgacgtagttataggtattgtaaataatactgtttatgaccctttacaacctgaactcgattccttcaaggaagaactcgacaaatattttaagaatcacacctcaccggacgttgacttaggagacatttccgggattaacgctagtgtagtcaatatccaaaaggagatagatagactgaatgaggtagcaaagaatcttaatgaatctttgatcgaccttcaggagctggggaagtacgaacaatacataaaatggccatggtacatttggctcgggtttattgctggactaattgcaatagtcatggtcactatcatgctgtgttgtatgacatcgtgctgctcatgcctcaagggatgttgtagctgtggatcttgttgccgagttggtatttatctttgcattaaattaaagcacaccaagaaaagacagatttatacagacatagagatgaaccgacttggaaagtaaaggctagc

SEQ ID NO: 21 - DNA, 4017 bp, Artificial Sequence
  Synthetic: Construct 7: Nucleotide sequence of S protein with dCt19 and VSGct to be added Vector B
ttcgaacaactaatatcctgtcttctctatccctatgaaaaaaactaacagagatcgatctgtttccttgacaccaggagccaccatgttcgtgttcctggtgctattacctctggtttcgtctcaatgcgtaaaccttacaactagaactcagcttcctccagcatacacaaattccttcactcgcggagtgtattatcctgataaggtctttcgatcatcagtgttgcattccacccaggatttgtttctcccgttcttttcaaatgtaacttggttccatgctatacatgtttccggaaccaatggaacaaagagatttgataacccagtgttaccatttaacgacggagtttatttcgcatcaactgagaaatccaatatcattagaggctggattttcggaacgaccctggattctaaaacgcaatccttgctgattgttaataatgcaacaaatgtggtcattaaagtctgtgaattccaattttgcaatgatccatttctcggcgtctattaccacaagaataacaaatcttggatggagtcagagttcagggtttatagttccgcaaataattgtacttttgaatacgtttcccaaccattcttaatggacttggagggaaaacagggaaattttaagaatctaagagaattcgtctttaagaatattgatggatatttcaagatctattcaaaacatacacctataaacctagttagagatctcccgcaagggttttcagccctagagccactagttgacctgccaattgggatcaacattactagattccagaccctactcgctctgcatcggtcatatttgacaccaggagattcatcgtcaggatggaccgctggagcagctgcttactatgttgggtatctgcaacctagaacatttctcctaaagtataatgaaaacgggactattacagacgcagtcgattgcgcactggatccactctcagagacaaagtgcactctaaaatcattcactgtcgagaaaggaatctatcaaacatcaaatttcagggtccagccaactgagagtattgtccggttccctaacataactaacttgtgccccttcggagaggttttcaatgctactcggttcgccagcgtctacgcatggaacagaaagaggatttcaaactgtgtcgcagattatagcgtcctctataattcagcatcattcagtacatttaaatgctatggtgtcagccccaccaaacttaatgacttatgttttaccaatgtatatgcagattcctttgtaatcagaggtgacgaagtgaggcaaatcgcacctggacagaccggaaagattgctgattataattataaactccctgatgattttaccggatgtgttattgcttggaacagcaataacctcgatagtaaggtcggaggaaactataactatttgtacagactgtttagaaagtcgaatttgaaaccttttgaaagagacatatccaccgagatttaccaggcgggcagcacaccgtgtaatggtgtagaaggattcaattgttactttcccctgcaatcatatgggtttcaaccaaccaatggagtcggatatcaaccatatcgtgtcgtcgtcctttccttcgagctgcttcatgcaccagctacagtctgcggacctaagaagagcactaatcttgtcaagaacaaatgtgtgaactttaattttaatggattaacaggaaccggagttttgaccgagagtaataagaagttcttgccgttccagcaatttggacgagacattgctgacaccacagatgcggttcgtgacccgcaaactttagagatcctagacatcaccccatgttcattcggtggagtttccgttattactcctggaacgaatacaagcaatcaagttgccgttctctatcaagatgttaattgtacagaagtgcctgtggccattcatgcagatcaactaacaccaacttggagagtttacagcactgggtccaatgtcttccaaacgcgcgccggctgcctcattggtgcagaacatgtgaataactcatacgaatgtgacattccaatcggtgccggcatatgcgcctcttaccagactcagactaattcgccaagaagagccaggtctgtcgcaagtcagtcaattattgcatacacaatgtcgttaggagcagagaatagtgtagcatactcaaacaattctatagcaatacctaccaacttcactatatcagtaactacagaaatattgccagtatccatgactaaaacaagtgtggattgcaccatgtacatctgtggagattccacagaatgcagcaatcttctcttgcaatacggatcattctgcacacaactgaatagggcactgactggaattgcagtcgagcaggataagaacacacaggaggtgtttgcccaagtcaaacaaatatacaaaacaccacccatcaaggattttggaggatttaatttctcacaaatactccccgacccatccaagccctccaaaaggagtttcattgaggacctcttgtttaataaggttaccttggcagatgccgggtttattaagcagtacggcgactgtcttggagacatagcagccagagatctaatttgtgcccagaaattcaatggactgacagtcctgcctcccttattaactgatgagatgatagctcagtatacatcagcattgttggctggtacaattacatctggatggacatttggtgccggagcggcattacaaatcccttttgcaatgcaaatggcctatagatttaatggaatcggagtaactcaaaatgttttatatgagaatcagaaattaattgcaaatcaattcaattcagctataggaaagattcaggattcactcagtagtacagcaagcgctctaggcaaattacaagacgtcgtcaatcagaatgcacaggcattaaatacactggtgaagcaattgagttccaatttcggagcaatttcatctgttctaaatgatatattgtcaagactggataaagtagaagccgaggtccaaatcgataggctgatcacaggaagacttcaatcactacagacatacgtcacccaacaactcatcagagcagcagaaattagagcctctgctaatctagccgcaacaaagatgtcagagtgcgtattgggacaatctaagagggtcgacttttgtggaaaggggtatcacttgatgtcctttcctcaatctgcaccacacggagttgtcttcttacatgtaacatatgtgcccgctcaagaaaagaatttcactacagcacctgcaatatgtcatgacggaaaagcacattttcctcgggagggagttttcgtttctaatggaacccattggttcgtgacccaaaggaacttttacgagcctcaaataattacaactgataatacattcgtttctggaaattgcgacgtagttataggtattgtaaataatactgtttatgaccctttacaacctgaactcgattccttcaaggaagaactcgacaaatattttaagaatcacacctcaccggacgttgacttaggagacatttccgggattaacgctagtgtagtcaatatccaaaaggagatagatagactgaatgaggtagcaaagaatcttaatgaatctttgatcgaccttcaggagctggggaagtacgaacaatacataaaatggccatggtacatttggctcgggtttattgctggactaattgcaatagtcatggtcactatcatgctgtgttgtatgacatcgtgctgctcatgcctcaagggatgttgtagctgtggatcttgttgccgagttggtatttatctttgcattaaattaaagcacaccaagaaaagacagatttatacagacatagagatgaaccgacttggaaagtaaagctcaaatcctgcacaacagattcttcatgtttgaaccaaatcaacttgtgatatcatgctcaaagaggccttaattaa

SEQ ID NO: 22 - protein, 1275 aa, Artificial Sequence
  Synthetic: Construct 8: S protein with dCt19 and VSVGct21
MFVFLVLLPLVSSQCVNLTTRTQLPPAYTNSFTRGVYYPDKVFRSSVLHSTQDLFLPFFSNVTWFHAIHVSGTNGTKRFDNPVLPFNDGVYFASTEKSNIIRGWIFGTTLDSKTQSLLIVNNATNVVIKVCEFQFCNDPFLGVYYHKNNKSWMESEFRVYSSANNCTFEYVSQPFLMDLEGKQGNFKNLREFVFKNIDGYFKIYSKHTPINLVRDLPQGFSALEPLVDLPIGINITRFQTLLALHRSYLTPGDSSSGWTAGAAAYYVGYLQPRTFLLKYNENGTITDAVDCALDPLSETKCTLKSFTVEKGIYQTSNFRVQPTESIVRFPNITNLCPFGEVFNATRFASVYAWNRKRISNCVADYSVLYNSASFSTFKCYGVSPTKLNDLCFTNVYADSFVIRGDEVRQIAPGQTGKIADYNYKLPDDFTGCVIAWNSNNLDSKVGGNYNYLYRLFRKSNLKPFERDISTEIYQAGSTPCNGVEGFNCYFPLQSYGFQPTNGVGYQPYRVVVLSFELLHAPATVCGPKKSTNLVKNKCVNFNFNGLTGTGVLTESNKKFLPFQQFGRDIADTTDAVRDPQTLEILDITPCSFGGVSVITPGTNTSNQVAVLYQDVNCTEVPVAIHADQLTPTWRVYSTGSNVFQTRAGCLIGAEHVNNSYECDIPIGAGICASYQTQTNSPRRARSVASQSIIAYTMSLGAENSVAYSNNSIAIPTNFTISVTTEILPVSMTKTSVDCTMYICGDSTECSNLLLQYGSFCTQLNRALTGIAVEQDKNTQEVFAQVKQIYKTPPIKDFGGFNFSQILPDPSKPSKRSFIEDLLFNKVTLADAGFIKQYGDCLGDIAARDLICAQKFNGLTVLPPLLTDEMIAQYTSALLAGTITSGWTFGAGAALQIPFAMQMAYRFNGIGVTQNVLYENQKLIANQFNSAIGKIQDSLSSTASALGKLQDVVNQNAQALNTLVKQLSSNFGAISSVLNDILSRLDKVEAEVQIDRLITGRLQSLQTYVTQQLIRAAEIRASANLAATKMSECVLGQSKRVDFCGKGYHLMSFPQSAPHGVVFLHVTYVPAQEKNFTTAPAICHDGKAHFPREGVFVSNGTHWFVTQRNFYEPQIITTDNTFVSGNCDVVIGIVNNTVYDPLQPELDSFKEELDKYFKNHTSPDVDLGDISGINASVVNIQKEIDRLNEVAKNLNESLIDLQELGKYEQYIKWPWYIWLGFIAGLIAIVMVTIMLCCMTSCCSCLKGCCSCGSCCKLKHTKKRQIYTDIEMNRLGK

SEQ ID NO: 23 - DNA, 3852 bp, Artificial Sequence
  Synthetic: Construct 8: Nucleotide sequence of S protein with dCt19 and VSGct21 to be added Vector A
ctcgagaggagccaccatgttcgtgttcctggtgctattacctctggtttcgtctcaatgcgtaaaccttacaactagaactcagcttcctccagcatacacaaattccttcactcgcggagtgtattatcctgataaggtctttcgatcatcagtgttgcattccacccaggatttgtttctcccgttcttttcaaatgtaacttggttccatgctatacatgtttccggaaccaatggaacaaagagatttgataacccagtgttaccatttaacgacggagtttatttcgcatcaactgagaaatccaatatcattagaggctggattttcggaacgaccctggattctaaaacgcaatccttgctgattgttaataatgcaacaaatgtggtcattaaagtctgtgaattccaattttgcaatgatccatttctcggcgtctattaccacaagaataacaaatcttggatggagtcagagttcagggtttatagttccgcaaataattgtacttttgaatacgtttcccaaccattcttaatggacttggagggaaaacagggaaattttaagaatctaagagaattcgtctttaagaatattgatggatatttcaagatctattcaaaacatacacctataaacctagttagagatctcccgcaagggttttcagccctagagccactagttgacctgccaattgggatcaacattactagattccagaccctactcgctctgcatcggtcatatttgacaccaggagattcatcgtcaggatggaccgctggagcagctgcttactatgttgggtatctgcaacctagaacatttctcctaaagtataatgaaaacgggactattacagacgcagtcgattgcgcactggatccactctcagagacaaagtgcactctaaaatcattcactgtcgagaaaggaatctatcaaacatcaaatttcagggtccagccaactgagagtattgtccggttccctaacataactaacttgtgccccttcggagaggttttcaatgctactcggttcgccagcgtctacgcatggaacagaaagaggatttcaaactgtgtcgcagattatagcgtcctctataattcagcatcattcagtacatttaaatgctatggtgtcagccccaccaaacttaatgacttatgttttaccaatgtatatgcagattcctttgtaatcagaggtgacgaagtgaggcaaatcgcacctggacagaccggaaagattgctgattataattataaactccctgatgattttaccggatgtgttattgcttggaacagcaataacctcgatagtaaggtcggaggaaactataactatttgtacagactgtttagaaagtcgaatttgaaaccttttgaaagagacatatccaccgagatttaccaggcgggcagcacaccgtgtaatggtgtagaaggattcaattgttactttcccctgcaatcatatgggtttcaaccaaccaatggagtcggatatcaaccatatcgtgtcgtcgtcctttccttcgagctgcttcatgcaccagctacagtctgcggacctaagaagagcactaatcttgtcaagaacaaatgtgtgaactttaattttaatggattaacaggaaccggagttttgaccgagagtaataagaagttcttgccgttccagcaatttggacgagacattgctgacaccacagatgcggttcgtgacccgcaaactttagagatcctagacatcaccccatgttcattcggtggagtttccgttattactcctggaacgaatacaagcaatcaagttgccgttctctatcaagatgttaattgtacagaagtgcctgtggccattcatgcagatcaactaacaccaacttggagagtttacagcactgggtccaatgtcttccaaacgcgcgccggctgcctcattggtgcagaacatgtgaataactcatacgaatgtgacattccaatcggtgccggcatatgcgcctcttaccagactcagactaattcgccaagaagagccaggtctgtcgcaagtcagtcaattattgcatacacaatgtcgttaggagcagagaatagtgtagcatactcaaacaattctatagcaatacctaccaacttcactatatcagtaactacagaaatattgccagtatccatgactaaaacaagtgtggattgcaccatgtacatctgtggagattccacagaatgcagcaatcttctcttgcaatacggatcattctgcacacaactgaatagggcactgactggaattgcagtcgagcaggataagaacacacaggaggtgtttgcccaagtcaaacaaatatacaaaacaccacccatcaaggattttggaggatttaatttctcacaaatactccccgacccatccaagccctccaaaaggagtttcattgaggacctcttgtttaataaggttaccttggcagatgccgggtttattaagcagtacggcgactgtcttggagacatagcagccagagatctaatttgtgcccagaaattcaatggactgacagtcctgcctcccttattaactgatgagatgatagctcagtatacatcagcattgttggctggtacaattacatctggatggacatttggtgccggagcggcattacaaatcccttttgcaatgcaaatggcctatagatttaatggaatcggagtaactcaaaatgttttatatgagaatcagaaattaattgcaaatcaattcaattcagctataggaaagattcaggattcactcagtagtacagcaagcgctctaggcaaattacaagacgtcgtcaatcagaatgcacaggcattaaatacactggtgaagcaattgagttccaatttcggagcaatttcatctgttctaaatgatatattgtcaagactggataaagtagaagccgaggtccaaatcgataggctgatcacaggaagacttcaatcactacagacatacgtcacccaacaactcatcagagcagcagaaattagagcctctgctaatctagccgcaacaaagatgtcagagtgcgtattgggacaatctaagagggtcgacttttgtggaaaggggtatcacttgatgtcctttcctcaatctgcaccacacggagttgtcttcttacatgtaacatatgtgcccgctcaagaaaagaatttcactacagcacctgcaatatgtcatgacggaaaagcacattttcctcgggagggagttttcgtttctaatggaacccattggttcgtgacccaaaggaacttttacgagcctcaaataattacaactgataatacattcgtttctggaaattgcgacgtagttataggtattgtaaataatactgtttatgaccctttacaacctgaactcgattccttcaaggaagaactcgacaaatattttaagaatcacacctcaccggacgttgacttaggagacatttccgggattaacgctagtgtagtcaatatccaaaaggagatagatagactgaatgaggtagcaaagaatcttaatgaatctttgatcgaccttcaggagctggggaagtacgaacaatacataaaatggccatggtacatttggctcgggtttattgctggactaattgcaatagtcatggtcactatcatgctgtgttgtatgacatcgtgctgctcatgcctcaagggatgttgtagctgtggatcttgttgcaaattaaagcacaccaagaaaagacagatttatacagacatagagatgaaccgacttggaaagtaaaggctagc

SEQ ID NO: 24 - DNA, 3993 bp, Artificial Sequence
  Synthetic: Construct 8: Nucleotide sequence of S protein with dCt19 and VSGct21 to be added Vector B
ttcgaacaactaatatcctgtcttctctatccctatgaaaaaaactaacagagatcgatctgtttccttgacaccaggagccaccatgttcgtgttcctggtgctattacctctggtttcgtctcaatgcgtaaaccttacaactagaactcagcttcctccagcatacacaaattccttcactcgcggagtgtattatcctgataaggtctttcgatcatcagtgttgcattccacccaggatttgtttctcccgttcttttcaaatgtaacttggttccatgctatacatgtttccggaaccaatggaacaaagagatttgataacccagtgttaccatttaacgacggagtttatttcgcatcaactgagaaatccaatatcattagaggctggattttcggaacgaccctggattctaaaacgcaatccttgctgattgttaataatgcaacaaatgtggtcattaaagtctgtgaattccaattttgcaatgatccatttctcggcgtctattaccacaagaataacaaatcttggatggagtcagagttcagggtttatagttccgcaaataattgtacttttgaatacgtttcccaaccattcttaatggacttggagggaaaacagggaaattttaagaatctaagagaattcgtctttaagaatattgatggatatttcaagatctattcaaaacatacacctataaacctagttagagatctcccgcaagggttttcagccctagagccactagttgacctgccaattgggatcaacattactagattccagaccctactcgctctgcatcggtcatatttgacaccaggagattcatcgtcaggatggaccgctggagcagctgcttactatgttgggtatctgcaacctagaacatttctcctaaagtataatgaaaacgggactattacagacgcagtcgattgcgcactggatccactctcagagacaaagtgcactctaaaatcattcactgtcgagaaaggaatctatcaaacatcaaatttcagggtccagccaactgagagtattgtccggttccctaacataactaacttgtgccccttcggagaggttttcaatgctactcggttcgccagcgtctacgcatggaacagaaagaggatttcaaactgtgtcgcagattatagcgtcctctataattcagcatcattcagtacatttaaatgctatggtgtcagccccaccaaacttaatgacttatgttttaccaatgtatatgcagattcctttgtaatcagaggtgacgaagtgaggcaaatcgcacctggacagaccggaaagattgctgattataattataaactccctgatgattttaccggatgtgttattgcttggaacagcaataacctcgatagtaaggtcggaggaaactataactatttgtacagactgtttagaaagtcgaatttgaaaccttttgaaagagacatatccaccgagatttaccaggcgggcagcacaccgtgtaatggtgtagaaggattcaattgttactttcccctgcaatcatatgggtttcaaccaaccaatggagtcggatatcaaccatatcgtgtcgtcgtcctttccttcgagctgcttcatgcaccagctacagtctgcggacctaagaagagcactaatcttgtcaagaacaaatgtgtgaactttaattttaatggattaacaggaaccggagttttgaccgagagtaataagaagttcttgccgttccagcaatttggacgagacattgctgacaccacagatgcggttcgtgacccgcaaactttagagatcctagacatcaccccatgttcattcggtggagtttccgttattactcctggaacgaatacaagcaatcaagttgccgttctctatcaagatgttaattgtacagaagtgcctgtggccattcatgcagatcaactaacaccaacttggagagtttacagcactgggtccaatgtcttccaaacgcgcgccggctgcctcattggtgcagaacatgtgaataactcatacgaatgtgacattccaatcggtgccggcatatgcgcctcttaccagactcagactaattcgccaagaagagccaggtctgtcgcaagtcagtcaattattgcatacacaatgtcgttaggagcagagaatagtgtagcatactcaaacaattctatagcaatacctaccaacttcactatatcagtaactacagaaatattgccagtatccatgactaaaacaagtgtggattgcaccatgtacatctgtggagattccacagaatgcagcaatcttctcttgcaatacggatcattctgcacacaactgaatagggcactgactggaattgcagtcgagcaggataagaacacacaggaggtgtttgcccaagtcaaacaaatatacaaaacaccacccatcaaggattttggaggatttaatttctcacaaatactccccgacccatccaagccctccaaaaggagtttcattgaggacctcttgtttaataaggttaccttggcagatgccgggtttattaagcagtacggcgactgtcttggagacatagcagccagagatctaatttgtgcccagaaattcaatggactgacagtcctgcctcccttattaactgatgagatgatagctcagtatacatcagcattgttggctggtacaattacatctggatggacatttggtgccggagcggcattacaaatcccttttgcaatgcaaatggcctatagatttaatggaatcggagtaactcaaaatgttttatatgagaatcagaaattaattgcaaatcaattcaattcagctataggaaagattcaggattcactcagtagtacagcaagcgctctaggcaaattacaagacgtcgtcaatcagaatgcacaggcattaaatacactggtgaagcaattgagttccaatttcggagcaatttcatctgttctaaatgatatattgtcaagactggataaagtagaagccgaggtccaaatcgataggctgatcacaggaagacttcaatcactacagacatacgtcacccaacaactcatcagagcagcagaaattagagcctctgctaatctagccgcaacaaagatgtcagagtgcgtattgggacaatctaagagggtcgacttttgtggaaaggggtatcacttgatgtcctttcctcaatctgcaccacacggagttgtcttcttacatgtaacatatgtgcccgctcaagaaaagaatttcactacagcacctgcaatatgtcatgacggaaaagcacattttcctcgggagggagttttcgtttctaatggaacccattggttcgtgacccaaaggaacttttacgagcctcaaataattacaactgataatacattcgtttctggaaattgcgacgtagttataggtattgtaaataatactgtttatgaccctttacaacctgaactcgattccttcaaggaagaactcgacaaatattttaagaatcacacctcaccggacgttgacttaggagacatttccgggattaacgctagtgtagtcaatatccaaaaggagatagatagactgaatgaggtagcaaagaatcttaatgaatctttgatcgaccttcaggagctggggaagtacgaacaatacataaaatggccatggtacatttggctcgggtttattgctggactaattgcaatagtcatggtcactatcatgctgtgttgtatgacatcgtgctgctcatgcctcaagggatgttgtagctgtggatcttgttgcaaattaaagcacaccaagaaaagacagatttatacagacatagagatgaaccgacttggaaagtaaagctcaaatcctgcacaacagattcttcatgtttgaaccaaatcaacttgtgatatcatgctcaaagaggccttaattaa

SEQ ID NO: 25 - protein, 1273 aa, Severe acute respiratory syndrome coronavirus 2
  misc_feature (1)..(1273): gb_QHW06059 (a full-length SARS-CoV-2 S protein amino acid variant sequence)
MFVFLVLLPLVSSQCVNLTTRTQLPPAYTNSFTRGVYYPDKVFRSSVLYSTQDLFLPFFSNVTWFHAIHVSGTNGTKRFDNPVLPFNDGVYFASTEKSNIIRGWIFGTTLDSKTQSLLIVNNATNVVIKVCEFQFCNDPFLGVYYHKNNKSWMESEFRVYSSANNCTFEYVSQPFLMDLEGKQGNFKNLREFVFKNIDGYFKIYSKHTPINLVRDLPQGFSALEPLVDLPIGINITRFQTLLALHRSYLTPGDSSSGWTAGAAAYYVGYLQPRTFLLKYNENGTITDAVDCALDPLSETKCTLKSFTVEKGIYQTSNFRVQPTESIVRFPNITNLCPFGEVFNATRFASVYAWNRKRISNCVADYSVLYNSASFSTFKCYGVSPTKLNDLCFTNVYADSFVIRGDEVRQIAPGQTGKIADYNYKLPDDFTGCVIAWNSNNLDSKVGGNYNYLYRLFRKSNLKPFERDISTEIYQAGSTPCNGVEGFNCYFPLQSYGFQPTNGVGYQPYRVVVLSFELLHAPATVCGPKKSTNLVKNKCVNFNFNGLTGTGVLTESNKKFLPFQQFGRDIADTTDAVRDPQTLEILDITPCSFGGVSVITPGTNTSNQVAVLYQDVNCTEVPVAIHADQLTPTWRVYSTGSNVFQTRAGCLIGAEHVNNSYECDIPIGAGICASYQTQTNSPRRARSVASQSIIAYTMSLGAENSVAYSNNSIAIPTNFTISVTTEILPVSMTKTSVDCTMYICGDSTECSNLLLQYGSFCTQLNRALTGIAVEQDKNTQEVFAQVKQIYKTPPIKDFGGFNFSQILPDPSKPSKRSFIEDLLFNKVTLADAGFIKQYGDCLGDIAARDLICAQKFNGLTVLPPLLTDEMIAQYTSALLAGTITSGWTFGAGAALQIPFAMQMAYRFNGIGVTQNVLYENQKLIANQFNSAIGKIQDSLSSTASALGKLQDVVNQNAQALNTLVKQLSSNFGAISSVLNDILSRLDKVEAEVQIDRLITGRLQSLQTYVTQQLIRAAEIRASANLAATKMSECVLGQSKRVDFCGKGYHLMSFPQSAPHGVVFLHVTYVPAQEKNFTTAPAICHDGKAHFPREGVFVSNGTHWFVTQRNFYEPQIITTDNTFVSGNCDVVIGIVNNTVYDPLQPELDSFKEELDKYFKNHTSPDVDLGDISGINASVVNIQKEIDRLNEVAKNLNESLIDLQELGKYEQYIKWPWYIWLGFIAGLIAIVMVTIMLCCMTSCCSCLKGCCSCGSCCKFDEDDSEPVLKGVKLHYT

SEQ ID NO: 26 - protein, 1273 aa, Severe acute respiratory syndrome coronavirus 2
  misc_feature (1)..(1273): gb_QHZ00379 (a full-length SARS-CoV-2 S protein amino acid variant sequence)
MFVFLVLLPLVSSQCVNLTTRTQLPPAYTNSFTRGVYYPDKVFRSSVLHSTQDLFLPFFSNVTWFHAIHVSGTNGTKRFDNPVLPFNDGVYFASTEKSNIIRGWIFGTTLDSKTQSLLIVNNATNVVIKVCEFQFCNDPFLGVYYHKNNKSWMESEFRVYSSANNCTFEYVSQPFLMDLEGKQGNFKNLREFVFKNIDGYFKIYSKHTPINLVRDLPQGFWALEPLVDLPIGINITRFQTLLALHRSYLTPGDSSSGWTAGAAAYYVGYLQPRTFLLKYNENGTITDAVDCALDPLSETKCTLKSFTVEKGIYQTSNFRVQPTESIVRFPNITNLCPFGEVFNATRFASVYAWNRKRISNCVADYSVLYNSASFSTFKCYGVSPTKLNDLCFTNVYADSFVIRGDEVRQIAPGQTGKIADYNYKLPDDFTGCVIAWNSNNLDSKVGGNYNYLYRLFRKSNLKPFERDISTEIYQAGSTPCNGVEGFNCYFPLQSYGFQPTNGVGYQPYRVVVLSFELLHAPATVCGPKKSTNLVKNKCVNFNFNGLTGTGVLTESNKKFLPFQQFGRDIADTTDAVRDPQTLEILDITPCSFGGVSVITPGTNTSNQVAVLYQDVNCTEVPVAIHADQLTPTWRVYSTGSNVFQTRAGCLIGAEHVNNSYECDIPIGAGICASYQTQTNSPRRARSVASQSIIAYTMSLGAENSVAYSNNSIAIPTNFTISVTTEILPVSMTKTSVDCTMYICGDSTECSNLLLQYGSFCTQLNRALTGIAVEQDKNTQEVFAQVKQIYKTPPIKDFGGFNFSQILPDPSKPSKRSFIEDLLFNKVTLADAGFIKQYGDCLGDIAARDLICAQKFNGLTVLPPLLTDEMIAQYTSALLAGTITSGWTFGAGAALQIPFAMQMAYRFNGIGVTQNVLYENQKLIANQFNSAIGKIQDSLSSTASALGKLQDVVNQNAQALNTLVKQLSSNFGAISSVLNDILSRLDKVEAEVQIDRLITGRLQSLQTYVTQQLIRAAEIRASANLAATKMSECVLGQSKRVDFCGKGYHLMSFPQSAPHGVVFLHVTYVPAQEKNFTTAPAICHDGKAHFPREGVFVSNGTHWFVTQRNFYEPQIITTDNTFVSGNCDVVIGIVNNTVYDPLQPELDSFKEELDKYFKNHTSPDVDLGDISGINASVVNIQKEIDRLNEVAKNLNESLIDLQELGKYEQYIKWPWYIWLGFIAGLIAIVMVTIMLCCMTSCCSCLKGCCSCGSCCKFDEDDSEPVLKGVKLHYT

SEQ ID NO: 27 - protein, 1273 aa, Severe acute respiratory syndrome coronavirus 2
  misc_feature (1)..(1273): gb_QHR84449 (a full-length SARS-CoV-2 S protein amino acid variant sequence)
MFVFLVLLPLVSSQCVNLTTRTQLPPAYTNSFTRGVYYPDKVFRSSVLHSTQDLFLPFFSNVTWFHAIHVSGTNGTKRFDNPVLPFNDGVYFASTEKSNIIRGWIFGTTLDSKTQSLLIVNNATNVVIKVCEFQFCNDPFLGVYYHKNNKSWMESEFRVYSSANNCTFEYVSQPFLMDLEGKQGNFKNLREFVFKNIDGYFKIYSKHTPINLVRDLPQGFSALEPLVDLPIGINITRFQTLLALHRRYLTPGDSSSGWTAGAAAYYVGYLQPRTFLLKYNENGTITDAVDCALDPLSETKCTLKSFTVEKGIYQTSNFRVQPTESIVRFPNITNLCPFGEVFNATRFASVYAWNRKRISNCVADYSVLYNSASFSTFKCYGVSPTKLNDLCFTNVYADSFVIRGDEVRQIAPGQTGKIADYNYKLPDDFTGCVIAWNSNNLDSKVGGNYNYLYRLFRKSNLKPFERDISTEIYQAGSTPCNGVEGFNCYFPLQSYGFQPTNGVGYQPYRVVVLSFELLHAPATVCGPKKSTNLVKNKCVNFNFNGLTGTGVLTESNKKFLPFQQFGRDIADTTDAVRDPQTLEILDITPCSFGGVSVITPGTNTSNQVAVLYQDVNCTEVPVAIHADQLTPTWRVYSTGSNVFQTRAGCLIGAEHVNNSYECDIPIGAGICASYQTQTNSPRRARSVASQSIIAYTMSLGAENSVAYSNNSIAIPTNFTISVTTEILPVSMTKTSVDCTMYICGDSTECSNLLLQYGSFCTQLNRALTGIAVEQDKNTQEVFAQVKQIYKTPPIKDFGGFNFSQILPDPSKPSKRSFIEDLLFNKVTLADAGFIKQYGDCLGDIAARDLICAQKFNGLTVLPPLLTDEMIAQYTSALLAGTITSGWTFGAGAALQIPFAMQMAYRFNGIGVTQNVLYENQKLIANQFNSAIGKIQDSLSSTASALGKLQDVVNQNAQALNTLVKQLSSNFGAISSVLNDILSRLDKVEAEVQIDRLITGRLQSLQTYVTQQLIRAAEIRASANLAATKMSECVLGQSKRVDFCGKGYHLMSFPQSAPHGVVFLHVTYVPAQEKNFTTAPAICHDGKAHFPREGVFVSNGTHWFVTQRNFYEPQIITTDNTFVSGNCDVVIGIVNNTVYDPLQPELDSFKEELDKYFKNHTSPDVDLGDISGINASVVNIQKEIDRLNEVAKNLNESLIDLQELGKYEQYIKWPWYIWLGFIAGLIAIVMVTIMLCCMTSCCSCLKGCCSCGSCCKFDEDDSEPVLKGVKLHYT

SEQ ID NO: 28 - protein, 1273 aa, Severe acute respiratory syndrome coronavirus 2
  misc_feature (1)..(1273): gb_QIA20044 (a full-length SARS-CoV-2 S protein amino acid variant sequence)
MFVFLVLLPLVSSQCVNLTTRTQLPPANTNSFTRGVYYPDKVFRSSVLHSTQDLFLPFFSNVTWFHAIHVSGTNGTKRFDNPVLPFNDGVYFASTEKSNIIRGWIFGTTLDSKTQSLLIVNNATNVVIKVCEFQFCNDPFLGVYYHKNNKSWMESEFRVYSSANNCTFEYVSQPFLMDLEGKQGNFKNLREFVFKNIDGYFKIYSKHTPINLVRDLPQGFSALEPLVDLPIGINITRFQTLLALHRSYLTPGDSSSGWTAGAAAYYVGYLQPRTFLLKYNENGTITDAVDCALDPLSETKCTLKSFTVEKGIYQTSNFRVQPTESIVRFPNITNLCPFGEVFNATRFASVYAWNRKRISNCVADYSVLYNSASFSTFKCYGVSPTKLNDLCFTNVYADSFVIRGDEVRQIAPGQTGKIADYNYKLPDDFTGCVIAWNSNNLDSKVGGNYNYLYRLFRKSNLKPFERDISTEIYQAGSTPCNGVEGFNCYFPLQSYGFQPTNGVGYQPYRVVVLSFELLHAPATVCGPKKSTNLVKNKCVNFNFNGLTGTGVLTESNKKFLPFQQFGRDIADTTDAVRDPQTLEILDITPCSFGGVSVITPGTNTSNQVAVLYQDVNCTEVPVAIHADQLTPTWRVYSTGSNVFQTRAGCLIGAEHVNNSYECDIPIGAGICASYQTQTNSPRRARSVASQSIIAYTMSLGAENSVAYSNNSIAIPTNFTISVTTEILPVSMTKTSVDCTMYICGDSTECSNLLLQYGSFCTQLNRALTGIAVEQDKNTQEVFAQVKQIYKTPPIKDFGGFNFSQILPDPSKPSKRSFIEDLLFNKVTLADAGFIKQYGDCLGDIAARDLICAQKFNGLTVLPPLLTDEMIAQYTSALLAGTITSGWTFGAGAALQIPFAMQMAYRFNGIGVTQNVLYENQKLIANQFNSAIGKIQDSLSSTASALGKLQDVVNQNAQALNTLVKQLSSNFGAISSVLNDILSRLDKVEAEVQIDRLITGRLQSLQTYVTQQLIRAAEIRASANLAATKMSECVLGQSKRVDFCGKGYHLMSFPQSAPHGVVFLHVTYVPAQEKNFTTAPAICHDGKAHFPREGVFVSNGTHWFVTQRNFYEPQIITTDNTFVSGNCDVVIGIVNNTVYDPLQPELDSFKEELDKYFKNHTSPDVDLGDISGINASVVNIQKEIDRLNEVAKNLNESLIDLQELGKYEQYIKWPWYIWLGFIAGLIAIVMVTIMLCCMTSCCSCLKGCCSCGSCCKFDEDDSEPVLKGVKLHYT

SEQ ID NO: 29 - protein, 1273 aa, Severe acute respiratory syndrome coronavirus 2; identical to SEQ ID NO: 1
  misc_feature (1)..(1273): gb_QHZ00358 (a full-length SARS-CoV-2 S protein amino acid variant sequence)

SEQ ID NO: 30 - protein, 1273 aa, Severe acute respiratory syndrome coronavirus 2; identical to SEQ ID NO: 1
  misc_feature (1)..(1273): dbj_BCA25664 (a full-length SARS-CoV-2 S protein amino acid variant sequence)

SEQ ID NO: 31 - protein, 1273 aa, Severe acute respiratory syndrome coronavirus 2; identical to SEQ ID NO: 1
  misc_feature (1)..(1273): gb_QHZ87582 (a full-length SARS-CoV-2 S protein amino acid variant sequence)

SEQ ID NO: 32 - protein, 1273 aa, Severe acute respiratory syndrome coronavirus 2; identical to SEQ ID NO: 1
  misc_feature (1)..(1273): dbj_BCA25674 (a full-length SARS-CoV-2 S protein amino acid variant sequence)

SEQ ID NO: 33 - protein, 1273 aa, Severe acute respiratory syndrome coronavirus 2; identical to SEQ ID NO: 1
  misc_feature (1)..(1273): gb_QHZ00389 (a full-length SARS-CoV-2 S protein amino acid variant sequence)

SEQ ID NO: 34 - protein, 1273 aa, Severe acute respiratory syndrome coronavirus 2; identical to SEQ ID NO: 1
  misc_feature (1)..(1273): gb_QHZ87592 (a full-length SARS-CoV-2 S protein amino acid variant sequence)

SEQ ID NO: 35 - protein, 1273 aa, Severe acute respiratory syndrome coronavirus 2; identical to SEQ ID NO: 1
  misc_feature (1)..(1273): gb_QIB84673 (a full-length SARS-CoV-2 S protein amino acid variant sequence)

SEQ ID NO: 36 - protein, 1273 aa, Severe acute respiratory syndrome coronavirus 2; identical to SEQ ID NO: 1
  misc_feature (1)..(1273): gb_QHR63260 (a full-length SARS-CoV-2 S protein amino acid variant sequence)

SEQ ID NO: 37 - protein, 1273 aa, Severe acute respiratory syndrome coronavirus 2; identical to SEQ ID NO: 1
  misc_feature (1)..(1273): gb_QIA98606 (a full-length SARS-CoV-2 S protein amino acid variant sequence)

SEQ ID NO: 38 - protein, 1273 aa, Severe acute respiratory syndrome coronavirus 2; identical to SEQ ID NO: 1
  misc_feature (1)..(1273): gb_QIA98596 (a full-length SARS-CoV-2 S protein amino acid variant sequence)

SEQ ID NO: 39 - protein, 1273 aa, Severe acute respiratory syndrome coronavirus 2; identical to SEQ ID NO: 1
  misc_feature (1)..(1273): gb_QHR63250 (a full-length SARS-CoV-2 S protein amino acid variant sequence)

SEQ ID NO: 40 - protein, 1273 aa, Severe acute respiratory syndrome coronavirus 2; identical to SEQ ID NO: 1
  misc_feature (1)..(1273): gb_QHR63280 (a full-length SARS-CoV-2 S protein amino acid variant sequence)

SEQ ID NO: 41 - protein, 1273 aa, Severe acute respiratory syndrome coronavirus 2; identical to SEQ ID NO: 1
  misc_feature (1)..(1273): gb_QHR63290 (a full-length SARS-CoV-2 S protein amino acid variant sequence)

SEQ ID NO: 42 - protein, 1273 aa, Severe acute respiratory syndrome coronavirus 2; identical to SEQ ID NO: 1
  misc_feature (1)..(1273): gb_QHR63270 (a full-length SARS-CoV-2 S protein amino acid variant sequence)

SEQ ID NO: 43 - protein, 1273 aa, Severe acute respiratory syndrome coronavirus 2; identical to SEQ ID NO: 1
  misc_feature (1)..(1273): gb_QHZ00399 (a full-length SARS-CoV-2 S protein amino acid variant sequence)

SEQ ID NO: 44 - protein, 1273 aa, Severe acute respiratory syndrome coronavirus 2; identical to SEQ ID NO: 1
  misc_feature (1)..(1273): dbj_BCA25644 (a full-length SARS-CoV-2 S protein amino acid variant sequence)

SEQ ID NO: 45 - protein, 1273 aa, Severe acute respiratory syndrome coronavirus 2; identical to SEQ ID NO: 1
  misc_feature (1)..(1273): dbj_BCA25654 (a full-length SARS-CoV-2 S protein amino acid variant sequence)

SEQ ID NO: 46 - protein, 1273 aa, Severe acute respiratory syndrome coronavirus 2; identical to SEQ ID NO: 1
  misc_feature (1)..(1273): gb_QHO62877 (a full-length SARS-CoV-2 S protein amino acid variant sequence)

SEQ ID NO: 47 - protein, 1273 aa, Severe acute respiratory syndrome coronavirus 2; identical to SEQ ID NO: 1
  misc_feature (1)..(1273): ref_YP_00972439 (a full-length SARS-CoV-2 S protein amino acid variant sequence)

SEQ ID NO: 48 - protein, 1273 aa, Severe acute respiratory syndrome coronavirus 2; identical to SEQ ID NO: 1
  misc_feature (1)..(1273): gb_QHW06039 (a full-length SARS-CoV-2 S protein amino acid variant sequence)

SEQ ID NO: 49 - protein, 1273 aa, Severe acute respiratory syndrome coronavirus 2; identical to SEQ ID NO: 1
  misc_feature (1)..(1273): gb_QHO62112 (a full-length SARS-CoV-2 S protein amino acid variant sequence)

SEQ ID NO: 50 - protein, 1273 aa, Severe acute respiratory syndrome coronavirus 2; identical to SEQ ID NO: 1
  misc_feature (1)..(1273): gb_QHQ71973 (a full-length SARS-CoV-2 S protein amino acid variant sequence)

SEQ ID NO: 51 - protein, 1273 aa, Severe acute respiratory syndrome coronavirus 2; identical to SEQ ID NO: 1
  misc_feature (1)..(1273): gb_QHW06049 (a full-length SARS-CoV-2 S protein amino acid variant sequence)

SEQ ID NO: 52 - protein, 1273 aa, Severe acute respiratory syndrome coronavirus 2; identical to SEQ ID NO: 1
  misc_feature (1)..(1273): gb_QHO60594 (a full-length SARS-CoV-2 S protein amino acid variant sequence)

SEQ ID NO: 53 - protein, 1273 aa, Severe acute respiratory syndrome coronavirus 2; identical to SEQ ID NO: 1
  misc_feature (1)..(1273): gb_QHN73810 (a full-length SARS-CoV-2 S protein amino acid variant sequence)

SEQ ID NO: 54 - protein, 1273 aa, Severe acute respiratory syndrome coronavirus 2; identical to SEQ ID NO: 1
  misc_feature (1)..(1273): gb_QHO62107 (a full-length SARS-CoV-2 S protein amino acid variant sequence)

SEQ ID NO: 55 - protein, 1273 aa, Severe acute respiratory syndrome coronavirus 2; identical to SEQ ID NO: 1
  misc_feature (1)..(1273): gb_QHQ82464 (a full-length SARS-CoV-2 S protein amino acid variant sequence)

SEQ ID NO: 56 - protein, 1273 aa, Severe acute respiratory syndrome coronavirus 2; identical to SEQ ID NO: 1
  misc_feature (1)..(1273): dbj_BBW89517 (a full-length SARS-CoV-2 S protein amino acid variant sequence)

SEQ ID NO: 57 - protein, 1273 aa, Severe acute respiratory syndrome coronavirus 2; identical to SEQ ID NO: 1
  misc_feature (1)..(1273): gb_QHU79204 (a full-length SARS-CoV-2 S protein amino acid variant sequence)

SEQ ID NO: 58 - protein, 1273 aa, Severe acute respiratory syndrome coronavirus 2; identical to SEQ ID NO: 1
  misc_feature (1)..(1273): gb_QHQ71963 (a full-length SARS-CoV-2 S protein amino acid variant sequence)

SEQ ID NO: 59 - protein, 1273 aa, Severe acute respiratory syndrome coronavirus 2; identical to SEQ ID NO: 1
  misc_feature (1)..(1273): gb_QHU79194 (a full-length SARS-CoV-2 S protein amino acid variant sequence)

SEQ ID NO: 60 - protein, 1273 aa, Severe acute respiratory syndrome coronavirus 2; identical to SEQ ID NO: 1
  misc_feature (1)..(1273): gb_QHN73795 (a full-length SARS-CoV-2 S protein amino acid variant sequence)

SEQ ID NO: 61 - protein, 1273 aa, Severe acute respiratory syndrome coronavirus 2; identical to SEQ ID NO: 1
  misc_feature (1)..(1273): gb_QHU36864 (a full-length SARS-CoV-2 S protein amino acid variant sequence)

SEQ ID NO: 62 - protein, 1273 aa, Severe acute respiratory syndrome coronavirus 2; identical to SEQ ID NO: 1
  misc_feature (1)..(1273): gb_QHD43416 (a full-length SARS-CoV-2 S protein amino acid variant sequence)

SEQ ID NO: 63 - protein, 1273 aa, Severe acute respiratory syndrome coronavirus 2; identical to SEQ ID NO: 1
  misc_feature (1)..(1273): gb_QHU36854 (a full-length SARS-CoV-2 S protein amino acid variant sequence)

SEQ ID NO: 64 - protein, 1273 aa, Severe acute respiratory syndrome coronavirus 2; identical to SEQ ID NO: 1
  misc_feature (1)..(1273): gb_QHU36844 (a full-length SARS-CoV-2 S protein amino acid variant sequence)

SEQ ID NO: 65 - protein, 1273 aa, Severe acute respiratory syndrome coronavirus 2; identical to SEQ ID NO: 1
  misc_feature (1)..(1273): gb_QHU36834 (a full-length SARS-CoV-2 S protein amino acid variant sequence)

SEQ ID NO: 66 - protein, 1273 aa, Severe acute respiratory syndrome coronavirus 2; identical to SEQ ID NO: 1
  misc_feature (1)..(1273): gb_QHU36824 (a full-length SARS-CoV-2 S protein amino acid variant sequence)

SEQ ID NO: 67 - protein, 1273 aa, Severe acute respiratory syndrome coronavirus 2; identical to SEQ ID NO: 1
  misc_feature (1)..(1273): Consensus sequence

SEQ ID NO: 68 - DNA, 35 bp, Artificial Sequence
  Synthetic: 1gVSVLeader_f (primer used for the Sanger sequencing of the rVSV-delta-G-SARS-CoV-2 genome)
acgaagacaaacaaaccattattatcattaaaagg

SEQ ID NO: 69 - DNA, 22 bp, Artificial Sequence
  Synthetic: 2gVSV_400f (primer used for the Sanger sequencing of the rVSV-delta-G-SARS-CoV-2 genome)
agcaggggatacaatcggaata

SEQ ID NO: 70 - DNA, 22 bp, Artificial Sequence
  Synthetic: 3gVSV_800f
cacctctgcaaaataaccggaa

SEQ ID NO: 71 - DNA, 21 bp, Artificial Sequence
  Synthetic: 4gVSV_1200f
gcagagatgtggtcgaatggc

SEQ ID NO: 72 - DNA, 20 bp, Artificial Sequence
  Synthetic: 5gVSV_1600f
tgaaggctttatacaggggc

SEQ ID NO: 73 - DNA, 20 bp, Artificial Sequence
  Synthetic: 6gVSV_200r
tggtagacatatcctcttag

SEQ ID NO: 74 - DNA, 20 bp, Artificial Sequence
  Synthetic: 7gVSV_400r
gctggttctggaagcatccg

SEQ ID NO: 75 - DNA, 24 bp, Artificial Sequence
  Synthetic: 8gVSV_800r
ctggaagcatcatttggaccattt

SEQ ID NO: 76 - DNA, 24 bp, Artificial Sequence
  Synthetic: 9gVSV_1200r
gctcttttcgcatactgcatcata

SEQ ID NO: 77 - DNA, 24 bp, Artificial Sequence
  Synthetic: 10gVSV_1600r
ccacttcctcatctgcatagtcat

SEQ ID NO: 78 - DNA, 21 bp, Artificial Sequence
  Synthetic: 11gVSV_1200f
gcagagatgtggtcgaatggc

SEQ ID NO: 79 - DNA, 20 bp, Artificial Sequence
  Synthetic: 12gVSV_1600f
tgaaggctttatacaggggc

SEQ ID NO: 80 - DNA, 22 bp, Artificial Sequence
  Synthetic: 13gVSV_2000f
tccatgactttccaacccaaga

SEQ ID NO: 81 - DNA, 24 bp, Artificial Sequence
  Synthetic: 14gVSV_2400f
cgagatggacacctatgatccgaa

SEQ ID NO: 82 - DNA, 24 bp, Artificial Sequence
  Synthetic: 15gVSV_1200r
gctcttttcgcatactgcatcata

SEQ ID NO: 83 - DNA, 24 bp, Artificial Sequence
  Synthetic: 16gVSV_1600r
ccacttcctcatctgcatagtcat

SEQ ID NO: 84 - DNA, 24 bp, Artificial Sequence
  Synthetic: 17gVSV_2000r
ctccgacagagatgaactctcctc

SEQ ID NO: 85 - DNA, 24 bp, Artificial Sequence
  Synthetic: 18gVSV_2400r
gctgccacatctgagtatgttctg

SEQ ID NO: 86 - DNA, 22 bp, Artificial Sequence
  Synthetic: 19gVSV_2000f
tccatgactttccaacccaaga

SEQ ID NO: 87 - DNA, 24 bp, Artificial Sequence
  Synthetic: 20gVSV_2400f
cgagatggacacctatgatccgaa

SEQ ID NO: 88 - DNA, 20 bp, Artificial Sequence
  Synthetic: 21gVSV_2800f2
ctacgatgatgagtcactgg

SEQ ID NO: 89 - DNA, 24 bp, Artificial Sequence
  Synthetic: 22gVSV_2400r
gctgccacatctgagtatgttctg

SEQ ID NO: 90 - DNA, 22 bp, Artificial Sequence
  Synthetic: 23gVSV_2800r
cctttttctcgacaatcaggcc

SEQ ID NO: 91 - DNA, 20 bp, Artificial Sequence
  Synthetic: 24CoV_S_rvs1
ctctttgttccattggttcc

SEQ ID NO: 92 - DNA, 24 bp, Artificial Sequence
  Synthetic: 25gVSV_2400f
cgagatggacacctatgatccgaa

SEQ ID NO: 93 - DNA, 20 bp, Artificial Sequence
  Synthetic: 26CoV_S_fw1
agtggatcctactcgagagg

SEQ ID NO: 94 - DNA, 20 bp, Artificial Sequence
  Synthetic: 27CoV_S_fw2
cattaaagtctgtgaattcc

SEQ ID NO: 95 - DNA, 20 bp, Artificial Sequence
  Synthetic: 28CoV_S_fw3
agcagctgcttactatgttg

SEQ ID NO: 96 - DNA, 20 bp, Artificial Sequence
  Synthetic: 29CoV_S_fw4
gtatatgcagattcctttgt

SEQ ID NO: 97 - DNA, 21 bp, Artificial Sequence
  Synthetic: 30CoV_S_fw5
acctaagaagagcactaatct

SEQ ID NO: 98 - DNA, 20 bp, Artificial Sequence
  Synthetic: 31CoV_S_rvs1
ctctttgttccattggttcc

SEQ ID NO: 99 - DNA, 25 bp, Artificial Sequence
  Synthetic: 32CoV_S_rvs2
gatctctaactaggtttataggtgt

SEQ ID NO: 100 - DNA, 20 bp, Artificial Sequence
  Synthetic: 33CoV_S_rvs3
agtagcattgaaaacctctc

SEQ ID NO: 101 - DNA, 20 bp, Artificial Sequence
  Synthetic: 34CoV_S_rvs4
cattacacggtgtgctgccc

SEQ ID NO: 102 - DNA, 20 bp, Artificial Sequence
  Synthetic: 35CoV_S_rvs5
gatagagaacggcaacttga

SEQ ID NO: 103 - DNA, 20 bp, Artificial Sequence
  Synthetic: 36CoV_S_rvs6
ggaatctccacagatgtaca

SEQ ID NO: 104 - DNA, 21 bp, Artificial Sequence
  Synthetic: 37CoV_S_fw5
acctaagaagagcactaatct

SEQ ID NO: 105 - DNA, 20 bp, Artificial Sequence
  Synthetic: 38CoV_S_fw6
tgacattccaatcggtgccg

SEQ ID NO: 106 - DNA, 25 bp, Artificial Sequence
  Synthetic: 39CoV_S_fw7
ccatcaaggattttggaggatttaa

SEQ ID NO: 107 - DNA, 20 bp, Artificial Sequence
  Synthetic: 40CoV_S_fw8
gctataggaaagattcagga

SEQ ID NO: 108 - DNA, 20 bp, Artificial Sequence
  Synthetic: 41CoV_S_fw9
acatgtaacatatgtgcccg

SEQ ID NO: 109 - DNA, 20 bp, Artificial Sequence
  Synthetic: 42CoV_S_fw10
tgatcgaccttcaggagctg

SEQ ID NO: 110 - DNA, 20 bp, Artificial Sequence
  Synthetic: 43CoV_S_rvs7
tgtaattgtaccagccaaca

SEQ ID NO: 111 - DNA, 20 bp, Artificial Sequence
  Synthetic: 44CoV_S_rvs8
tgatgagttgttgggtgacg

SEQ ID NO: 112 - DNA, 20 bp, Artificial Sequence
  Synthetic: 45CoV_S_rvs9
ggaatcgagttcaggttgta

SEQ ID NO: 113 - DNA, 20 bp, Artificial Sequence
  Synthetic: 46CoV_S_rvs10
aacgcgtaaacagctagcct

SEQ ID NO: 114 - DNA, 25 bp, Artificial Sequence
  Synthetic: 47gVSVGene4_f
ttaatgtttggcctgattgtcgaga

SEQ ID NO: 115 - DNA, 21 bp, Artificial Sequence
  Synthetic: 48gVSVGene4_rev
gcgctcatcgggattcaggaa

SEQ ID NO: 116 - DNA, 22 bp, Artificial Sequence
  Synthetic: 49gVSV_4800r
ccaccacgtcaaatgttatttc

SEQ ID NO: 117 - DNA, 20 bp, Artificial Sequence
  Synthetic: 50CoV_S_fw10
acatgtaacatatgtgcccg

SEQ ID NO: 118 - DNA, 20 bp, Artificial Sequence
  Synthetic: 51gVSV_5300f
gggcaacaaaccaattgaat

SEQ ID NO: 119 - DNA, 23 bp, Artificial Sequence
  Synthetic: 52gVSV_5800f
gcaagagaatcaaggcctttagt

SEQ ID NO: 120 - DNA, 25 bp, Artificial Sequence
  Synthetic: 53gVSV_6300f
cccatcgataatatactctgacaaa

SEQ ID NO: 121 - DNA, 24 bp, Artificial Sequence
  Synthetic: 54gVSV_6800f
tccttaatcgagagaactcatgaa

SEQ ID NO: 122 - DNA, 22 bp, Artificial Sequence
  Synthetic: 55gVSV_4800r
ccaccacgtcaaatgttatttc

SEQ ID NO: 123 - DNA, 23 bp, Artificial Sequence
  Synthetic: 56gVSV_5200r2
actaaaggccttgattctcttgc

SEQ ID NO: 124 - DNA, 24 bp, Artificial Sequence
  Synthetic: 57gVSV_5200r
gatgggtctagtaagtcgggtatt

SEQ ID NO: 125 - DNA, 24 bp, Artificial Sequence
  Synthetic: 58gVSV_6200r2
ttcatgagttctctcgattaagga

SEQ ID NO: 126 - DNA, 20 bp, Artificial Sequence
  Synthetic: 59gVSV_6200r
cactcgtgaccatctcttgg

SEQ ID NO: 127 - DNA, 25 bp, Artificial Sequence
  Synthetic: 60gVSV_6300f
cccatcgataatatactctgacaaa

SEQ ID NO: 128 - DNA, 24 bp, Artificial Sequence
  Synthetic: 61gVSV_6800f
tccttaatcgagagaactcatgaa

SEQ ID NO: 129 - DNA, 21 bp, Artificial Sequence
  Synthetic: 62gVSV_7300f
tgaccaaatacccacttgtgc

SEQ ID NO: 130 - DNA, 25 bp, Artificial Sequence
  Synthetic: 63gVSV_7800f
cgaacttgttaaagactgaggttaa

SEQ ID NO: 131 - DNA, 20 bp, Artificial Sequence
  Synthetic: 64JKgVSV_8300f
cgggatccatgacgtcttta

SEQ ID NO: 132 - DNA, 24 bp, Artificial Sequence
  Synthetic: 65gVSV_8800f
tttgagacccatagaagagatcac

SEQ ID NO: 133 - DNA, 20 bp, Artificial Sequence
  Synthetic: 66gVSV_6200r
cactcgtgaccatctcttgg

SEQ ID NO: 134 - DNA, 25 bp, Artificial Sequence
  Synthetic: 67gVSV_7200r2
ttaacctcagtctttaacaagttcg

SEQ ID NO: 135 - DNA, 22 bp, Artificial Sequence
  Synthetic: 68gVSV_7200r
tgaaccctgatgtgttacatgg

SEQ ID NO: 136 - DNA, 24 bp, Artificial Sequence
  Synthetic: 69gVSV_8200r2
gtgatctcttctatgggtctcaaa

SEQ ID NO: 137 - DNA, 25 bp, Artificial Sequence
  Synthetic: 70gVSV_8200r
tcgtttctaattcgtctctaatagg

SEQ ID NO: 138 - DNA, 20 bp, Artificial Sequence
  Synthetic: 71gVSV_8300f
cgggatccatgacgtcttta

SEQ ID NO: 139 - DNA, 24 bp, Artificial Sequence
  Synthetic: 72gVSV_8800f
tttgagacccatagaagagatcac

SEQ ID NO: 140 - DNA, 20 bp, Artificial Sequence
  Synthetic: 73gVSV_9300f
ctcctatccgacaagcaacc

SEQ ID NO: 141 - DNA, 20 bp, Artificial Sequence
  Synthetic: 74gVSV_9800f
gaatcaggttgggccaatta

SEQ ID NO: 142 - DNA, 22 bp, Artificial Sequence
  Synthetic: 75gVSV_10300f
gagcgaaaagaatgcagtaaca

SEQ ID NO: 143 - DNA, 20 bp, Artificial Sequence
  Synthetic: 76gVSV_10800f
gcttttggctgagtttgatg

SEQ ID NO: 144 - DNA, 20 bp, Artificial Sequence
  Synthetic: 77JKVSVGene6_f
aaacacaggaatgattgaat

SEQ ID NO: 145 - DNA, 25 bp, Artificial Sequence
  Synthetic: 78gVSV_8200r
tcgtttctaattcgtctctaatagg

SEQ ID NO: 146 - DNA, 20 bp, Artificial Sequence
  Synthetic: 79gVSV_9200r2
taattggcccaacctgattc

SEQ ID NO: 147 - DNA, 25 bp, Artificial Sequence
  Synthetic: 80gVSV_9200r
cgctctcacaaatatatgttccata

SEQ ID NO: 148 - DNA, 20 bp, Artificial Sequence
  Synthetic: 81gVSV_10200r2
catcaaactcagccaaaagc

SEQ ID NO: 149 - DNA, 24 bp, Artificial Sequence
  Synthetic: 82JRVSVTrailer_r
acgaagaccacaaaaccagataaa

SEQ ID NO: 150 - DNA, 13440 bp, Artificial Sequence
  Synthetic: Nucleotide sequence for rVSV-delta-G-SARS-CoV-2 clone MB1
acgaagacaaacaaaccattattatcattaaaaggctcaggagaaactttaacagtaatcaaaatgtctgttacagtcaagagaatcattgacaacacagtcgtagttccaaaacttcctgcaaatgaggatccagtggaatacccggcagattacttcagaaaatcaaaggagattcctctttacatcaatactacaaaaagtttgtcagatctaagaggatatgtctaccaaggcctcaaatccggaaatgtatcaatcatacatgtcaacagctacttgtatggagcattaaaggacatccggggtaagttggataaagattggtcaagtttcggaataaacatcgggaaagcaggggatacaatcggaatatttgaccttgtatccttgaaagccctggacggcgtacttccagatggagtatcggatgcttccagaaccagcgcagatgacaaatggttgcctttgtatctacttggcttatacagagtgggcagaacacaaatgcctgaatacagaaaaaagctcatggatgggctgacaaatcaatgcaaaatgatcaatgaacagtttgaacctcttgtgccagaaggtcgtgacatttttgatgtgtggggaaatgacagtaattacacaaaaattgtcgctgcagtggacatgttcttccacatgttcaaaaaacatgaatgtgcctcgttcagatacggaactattgtttccagattcaaagattgtgctgcattggcaacatttggacacctctgcaaaataaccggaatgtctacagaagatgtaacgacctggatcttgaaccgagaagttgcagatgaaatggtccaaatgatgcttccaggccaagaaattgacaaggccgattcatacatgccttatttgatcgactttggattgtcttctaagtctccatattcttccgtcaaaaaccctgccttccacttctgggggcaattgacagctcttctgctcagatccaccagagcaaggaatgcccgacagcctgatgacattgagtatacatctcttactacagcaggtttgttgtacgcttatgcagtaggatcctctgccgacttggcacaacagttttgtgttggagataacaaatacactccagatgatagtaccggaggattgacgactaatgcaccgccacaaggcagagatgtggtcgaatggctcggatggtttgaagatcaaaacagaaaaccgactcctgatatgatgcagtatgcgaaaagagcagtcatgtcactgcaaggcctaagagagaagacaattggcaagtatgctaagtcagaatttgacaaatgaccctataattctcagatcacctattatatattatgctacatatgaaaaaaactaacagatatcatggataatctcacaaaagttcgtgagtatctcaagtcctattctcgtctggatcaggcggtaggagagatagatgagatcgaagcacaacgagctgaaaagtccaattatgagttgttccaagaggatggagtggaagagcatactaagccctcttattttcaggcagcagatgattctgacacagaatctgaaccagaaattgaagacaatcaaggcttgtatgcaccagatccagaagctgagcaagttgaaggctttatacaggggcctttagatgactatgcagatgaggaagtggatgttgtatttacttcggactggaaacagcctgagcttgaatctgacgagcatggaaagaccttacggttgacatcgccagagggtttaagtggagagcagaaatcccagtggctttcgacgattaaagcagtcgtgcaaagtgccaaatactggaatctggcagagtgcacatttgaagcatcgggagaaggggtcattatgaaggagcgccagataactccggatgtatataaggtcactccagtgatgaacacacatccgtcccaatcagaagcagtatcagatgtttggtctctctcaaagacatccatgactttccaacccaagaaagcaagtcttcagcctctcaccatatccttggatgaattgttctcatctagaggagagttcatctctgtcggaggtgacggacgaatgtctcataaagaggccatcctgctcggcctgagatacaaaaagttgtacaatcaggcgagagtcaaatattctctgtagactatgaaaaaaagtaacagatatcacgatctaagtgttatcccaatccattcatcatgagttccttaaagaagattctcggtctgaaggggaaaggtaagaaatctaagaaattagggatcgcaccacccccttatgaagaggacactagcatggagtatgctccgagcgctccaattgacaaatcctattttggagttgacgagatggacacctatgatccgaatcaattaagatctgagaaattcttctttacagtgaaaatgacggttagatctaatcgtccgttcagaacatactcagatgtggcagccgctgtatcccattgggatcacatgtacatcggaatggcagggaaacgtcccttctacaaaatcttggcttttttgggttcttctaatctaaaggccactccagcggtattggcagatcaaggtcaaccagagtatcacgctcactgcgaaggcagggcttatttgccacataggatggggaagacccctcccatgctcaatgtaccagagcacttcagaagaccattcaatataggtctttacaagggaacgattgagctcacaatgaccatctacgatgatgagtcactggaagcagctcctatgatctgggatcatttcaattcttccaaattttctgatttcagagagaaggccttaatgtttggcctgattgtcgagaaaaaggcatctggagcgtgggtcctggactctatcggccacttcaaatgagctagtctaacttctagcttctgaacaatccccggtttactcagtctcccctaattccagcctctcgaacaactaatatcctgtcttttctatccctatgaaaaaaactaacagagattgatctgtttacgcgctagtggatcctactcgagaggagccaccatgttcgtgttcctggtgctattacctctggtttcgtctcaatgcgtaaaccttacaactagaactcagcttcctccagcatacacaaattccttcactcgcggagtgtattatcctgataaggtctttcgatcatcagtgttgcattccacccaggatttgtttctcccgttcttttcaaatgtaacttggttccatgctatacatgtttccggaaccaatggaacaaagagatttgataacccagtgttaccatttaacgacggagtttatttcgcatcaactgagaaatccaatatcattagaggctggattttcggaacgaccctggattctaaaacgcaatccttgctgattgttaataatgcaacaaatgtggtcattaaagtctgtgaattccaattttgcaatgatccatttctcggcgtctattaccacaagaataacaaatcttggatggagtcagagttcagggtttatagttccgcaaataattgtacttttgaatacgtttcccaaccattcttaatggacttggagggaaaacagggaaattttaagaatctaagagaattcgtctttaagaatattgatggatatttcaagatctattcaaaacatacacctataaacctagttagagatctcccgcaagggttttcagccctagagccactagttgacctgccaattgggatcaacattactagattccagaccctactcgctctgcatcggtcatatttgacaccaggagattcatcgtcaggatggaccgctggagcagctgcttactatgttgggtatctgcaacctagaacatttctcctaaagtataatgaaaacgggactattacagacgcagtcgattgcgcactggatccactctcagagacaaagtgcactctaaaatcattcactgtcgagaaaggaatctatcaaacatcaaatttcagggtccagccaactgagagtattgtccggttccctaacataactaacttgtgccccttcggagaggttttcaatgctactcggttcgccagcgtctacgcatggaacagaaagaggatttcaaactgtgtcgcagattatagcgtcctctataattcagcatcattcagtacatttaaatgctatggtgtcagccccaccaaacttaatgacttatgttttaccaatgtatatgcagattcctttgtaatcagaggtgacgaagtgaggcaaatcgcacctggacagaccggaaagattgctgattataattataaactccctgatgattttaccggatgtgttattgcttggaacagcaataacctcgatagtaaggtcggaggaaactataactatttgtacagactgtttagaaagtcgaatttgaaaccttttgaaagagacatatccaccgagatttaccaggcgggcagcacaccgtgtaatggtgtagaaggattcaattgttactttcccctgcaatcatatgggtttcaaccaaccaatggagtcggatatcaaccatatcgtgtcgtcgtcctttccttcgagctgcttcatgcaccagctacagtctgcggacctaagaagagcactaatcttgtcaagaacaaatgtgtgaactttaattttaatggattaacaggaaccggagttttgaccgagagtaataagaagttcttgccgttccagcaatttggacgagacattgctgacaccacagatgcggttcgtgacccgcaaactttagagatcctagacatcaccccatgttcattcggtggagtttccgttattactcctggaacgaatacaagcaatcaagttgccgttctctatcaagatgttaattgtacagaagtgcctgtggccattcatgcagatcaactaacaccaacttggagagtttacagcactgggtccaatgtcttccaaacgcgcgccggctgcctcattggtgcagaacatgtgaataactcatacgaatgtgacattccaatcggtgccggcatatgcgcctcttaccagactcagactaattcgccaagaggagccaggtctgtcgcaagtcagtcaattattgcatacacaatgtcgttaggagcagagaatagtgtagcatactcaaacaattctatagcaatacctaccaacttcactatatcagtaactacagaaatattgccagtatccatgactaaaacaagtgtggattgcaccatgtacatctgtggagattccacagaatgcagcaatcttctcttgcaatacggatcattctgcacacaactgaatagggcactgactggaattgcagtcgagcaggataagaacacacaggaggtgtttgcccaagtcaaacaaatatacaaaacaccacccatcaaggattttggaggatttaatttctcacaaatactccccgacccatccaagcccttcaaaaggagtttcattgaggacctcttgtttaataaggttaccttggcagatgccgggtttattaagcagtacggcgactgtcttggagacatagcagccagagatctaatttgtgcccagaaattcaatggactgacagtcctgcctcccttattaactgatgagatgatagctcagtatacatcagcattgttggctggtacaattacatctggatggacatttggtgccggagcggcattacaaatcccttttgcaatgcaaatggcctatagatttaatggaatcggagtaactcaaaatgttttatatgagaatcagaaattaattgcaaatcaattcaattcagctataggaaagattcaggattcactcagtagtacagcaagcgctctaggcaaattacaagacgtcgtcaatcagaatgcacaggcattaaatacactggtgaagcaattgagttccaatttcggagcaatttcatctgttctaaatgatatattgtcaagactggataaagtagaagccgaggtccaaatcgataggctgatcacaggaagacttcaatcactacagacatacgtcacccaacaactcatcagagcagcagaaattagagcctctgctaatctagccgcaacaaagatgtcagagtgcgtattgggacaatctaagagggtcgacttttgtggaaaggggtatcacttgatgtcctttcctcaatctgcaccacacggagttgtcttcttacatgtaacatatgtgcccgctcaagaaaagaatttcactacagcacctgcaatatgtcatgacggaaaagcacattttcctcgggagggagttttcgtttctaatggaacccattggttcgtgacccaaaggaacttttacgagcctcaaataattacaactgataatacattcgtttctggaaattgcgacgtagttataggtattgtaaataatactgtttatgaccctttacaacctgaactcgattccttcaaggaagaactcgacaaatattttaagaatcacacctcaccggacgttgacttaggagacatttccgggattaacgctagtgtagtcaatatccaaaaggagatagatagactgaatgaggtagcaaagaatcttaatgaatctttgatcgaccttcaggagctggggaagtacgaacaatacataaaatggccatggtacatttggctcgggtttattgctggactaattgcaatagtcatggtcactatcatgctgtgttgtatgacatcgtgctgctcatgcctcaagggatgttgtagctgttgatcttgttgcaagttcgatgaggatgattcagaaccagttttaaaaggagtaaagttgcattacacataaaggctagctgtttacgcgttatccatgctcaaagaggcctcaattatatttgagtttttaatttttatgaaaaaaactaacagcaatcatggaagtccacgattttgagaccgacgagttcaatgatttcaatgaagatgactatgccacaagagaattcctgaatcccgatgagcgcatgacgtacttgaatcatgctgattacaacctgaattctcctctaattagtgatgatattgacaatttaatcaggaaattcaattctcttccaattccctcgatgtgggatagtaagaactgggatggagttcttgagatgttaacgtcatgtcaagccaatcccatcccaacatctcagatgcataaatggatgggaagttggttaatgtctgataatcatgatgccagtcaagggtatagttttttacatgaagtggacaaagaggcagaaataacatttgacgtggtggagaccttcatccgcggctggggcaacaaaccaattgaatacatcaaaaaggaaagatggactgactcattcaaaattctcgcttatttgtgtcaaaagtttttggacttacacaagttgacattaatcttaaatgctgtctctgaggtggaattgctcaacttggcgaggactttcaaaggcaaagtcagaagaagttctcatggaacgaacatatgcaggattagggttcccagcttgggtcctacttttatttcagaaggatgggcttacttcaagaaacttgatattctaatggaccgaaactttctgttaatggtcaaagatgtgattatagggaggatgcaaacggtgctatccatggtatgtagaatagacaacctgttctcagagcaagacatcttctcccttctaaatatctacagaattggagataaaattgtggagaggcagggaaatttttcttatgacttgattaaaatggtggaaccgatatgcaacttgaagctgatgaaattagcaagagaatcaaggcctttagtcccacaattccctcattttgaaaatcatatcaagacttctgttgatgaaggggcaaaaattgaccgaggtataagattcctccatgatcagataatgagtgtgaaaacagtggatctcacactggtgatttatggatcgttcagacattggggtcatccttttatagattattacactggactagaaaaattacattcccaagtaaccatgaagaaagatattgatgtgtcatatgcaaaagcacttgcaagtgatttagctcggattgttctatttcaacagttcaatgatcataaaaagtggttcgtgaatggagacttgctccctcatgatcatccctttaaaagtcatgttaaagaaaatacatggcccacagctgctcaagttcaagattttggagataaatggcatgaacttccgctgattaaatgttttgaaatacccgacttactagacccatcgataatatactctgacaaaagtcattcaatgaataggtcagaggtgttgaaacatgtccgaatgaatccgaacactcctatccctagtaaaaaggtgttgcagactatgttggacacaaaggctaccaattggaaagaatttcttaaagagattgatgagaagggcttagatgatgatgatctaattattggtcttaaaggaaaggagagggaactgaagttggcaggtagatttttctccctaatgtcttggaaattgcgagaatactttgtaattaccgaatatttgataaagactcatttcgtccctatgtttaaaggcctgacaatggcggacgatctaactgcagtcattaaaaagatgttagattcctcatccggccaaggattgaagtcatatgaggcaatttgcatagccaatcacattgattacgaaaaatggaataaccaccaaaggaagttatcaaacggcccagtgttccgagttatgggccagttcttaggttatccatccttaatcgagagaactcatgaattttttgagaaaagtcttatatactacaatggaagaccagacttgatgcgtgttcacaacaacacactgatcaattcaacctcccaacgagtttgttggcaaggacaagagggtggactggaaggtctacggcaaaaaggatggagtatcctcaatctactggttattcaaagagaggctaaaatcagaaacactgctgtcaaagtcttggcacaaggtgataatcaagttatttgcacacagtataaaacgaagaaatcgagaaacgttgtagaattacagggtgctctcaatcaaatggtttctaataatgagaaaattatgactgcaatcaaaatagggacagggaagttaggacttttgataaatgacgatgagactatgcaatctgcagattacttgaattatggaaaaataccgattttccgtggagtgattagagggttagagaccaagagatggtcacgagtgacttgtgtcaccaatgaccaaatacccacttgtgctaatataatgagctcagtttccacaaatgctctcaccgtagctcattttgctgagaacccaatcaatgccatgatacagtacaattattttgggacatttgctagactcttgttgatgatgcatgatcctgctcttcgtcaatcattgtatgaagttcaagataagataccaggcttgcacagttctactttcaaatacgccatgttgtatttggacccttccattggaggagtgtcgggcatgtctttgtccaggtttttgattagagccttcccagatcccgtaacagaaagtctctcattctggagattcatccatgtacatgctcgaagtgagcatctgaaggagatgagtgcagtatttggaaaccccgagatagccaagtttcgaataactcacatagacaagctagtagaagatccaacctctctgaacatcgctatgggaatgagtccagcgaacttgttaaagactgaggttaaaaaatgcttaatcgaatcaagacaaaccatcaggaaccaggtgattaaggatgcaaccatatatttgtatcatgaagaggatcggctcagaagtttcttatggtcaataaatcctctgttccctagatttttaagtgaattcaaatcaggcacttttttgggagtcgcagacgggctcatcagtctatttcaaaattctcgtactattcggaactcctttaagaaaaagtatcatagggaattggatgatttgattgtgaggagtgaggtatcctctttgacacatttagggaaacttcatttgagaaggggatcatgtaaaatgtggacatgttcagctactcatgctgacacattaagatacaaatcctggggccgtacagttattgggacaactgtaccccatccattagaaatgttgggtccacaacatcgaaaagagactccttgtgcaccatgtaacacatcagggttcaattatgtttctgtgcattgtccagacgggatccatgacgtctttagttcacggggaccattgcctgcttatctagggtctaaaacatctgaatctacatctattttgcagccttgggaaagggaaagcaaagtcccactgattaaaagagctacacgtcttagagatgctatctcttggtttgttgaacccgactctaaactagcaatgactatactttctaacatccactctttaacaggcgaagaatggaccaaaaggcagcatgggttcaaaagaacagggtctgcccttcataggttttcgacatctcggatgagccatggtgggttcgcatctcagagcactgcagcattgaccaggttgatggcaactacagacaccatgagggatctgggagatcagaatttcgactttttattccaagcaacgttgctctatgctcaaattaccaccactgttgcaagagacggatggatcaccagttgtacagatcattatcatattgcctgtaagtcctgtttgagacccatagaagagatcaccctggactcaagtatggactacacgcccccagatgtatcccatgtgctgaagacatggaggaatggggaaggttcgtggggacaagagataaaacagatctatcctttagaagggaattggaagaatttagcacctgctgagcaatcctatcaagtcggcagatgtataggttttctatatggagacttggcgtatagaaaatctactcatgccgaggacagttctctatttcctctatctatacaaggtcgtattagaggtcgaggtttcttaaaagggttgctagacggattaatgagagcaagttgctgccaagtaatacaccggagaagtctggctcatttgaagaggccggccaacgcagtgtacggaggtttgatttacttgattgataaattgagtgtatcacctccattcctttctcttactagatcaggacctattagagacgaattagaaacgattccccacaagatcccaacctcctatccgacaagcaaccgtgatatgggggtgattgtcagaaattacttcaaataccaatgccgtctaattgaaaagggaaaatacagatcacattattcacaattatggttattctcagatgtcttatccatagacttcattggaccattctctatttccaccaccctcttgcaaatcctatacaagccatttttatctgggaaagataagaatgagttgagagagctggcaaatctttcttcattgctaagatcaggagaggggtgggaagacatacatgtgaaattcttcaccaaggacatattattgtgtccagaggaaatcagacatgcttgcaagttcgggattgctaaggataataataaagacatgagctatcccccttggggaagggaatccagagggacaattacaacaatccctgtttattatacgaccaccccttacccaaagatgctagagatgcctccaagaatccaaaatcccctgctgtccggaatcaggttgggccaattaccaactggcgctcattataaaattcggagtatattacatggaatgggaatccattacagggacttcttgagttgtggagacggctccggagggatgactgctgcattactacgagaaaatgtgcatagcagaggaatattcaatagtctgttagaattatcagggtcagtcatgcgaggcgcctctcctgagccccccagtgccctagaaactttaggaggagataaatcgagatgtgtaaatggtgaaacatgttgggaatatccatctgacttatgtgacccaaggacttgggactatttcctccgactcaaagcaggcttggggcttcaaattgatttaattgtaatggatatggaagttcgggattcttctactagcctgaaaattgagacgaatgttagaaattatgtgcaccggattttggatgagcaaggagttttaatctacaagacttatggaacatatatttgtgagagcgaaaagaatgcagtaacaatccttggtcccatgttcaagacggtcgacttagttcaaacagaatttagtagttctcaaacgtctgaagtatatatggtatgtaaaggtttgaagaaattaatcgatgaacccaatcccgattggtcttccatcaatgaatcctggaaaaacctgtacgcattccagtcatcagaacaggaatttgccagagcaaagaaggttagtacatactttaccttgacaggtattccctcccaattcattcctgatccttttgtaaacattgagactatgctacaaatattcggagtacccacgggtgtgtctcatgcggctgccttaaaatcatctgatagacctgcagatttattgaccattagccttttttatatggcgattatatcgtattataacatcaatcatatcagagtaggaccgatacctccgaaccccccatcagatggaattgcacaaaatgtggggatcgctataactggtataagcttttggctgagtttgatggagaaagacattccactatatcaacagtgtttagcagttatccagcaatcattcccgattaggtgggaggctgtttcagtaaaaggaggatacaagcagaagtggagtactagaggtgatgggctcccaaaagatacccgaatttcagactccttggccccaatcgggaactggatcagatctctggaattggtccgaaaccaagttcgtctaaatccattcaatgagatcttgttcaatcagctatgtcgtacagtggataatcatttgaaatggtcaaatttgcgaagaaacacaggaatgattgaatggatcaatagacgaatttcaaaagaagaccggtctatactgatgttgaagagtgacctacacgaggaaaactcttggagagattaaaaaatcatgaggagactccaaactttaagtatgaaaaaaactttgatccttaagaccctcttgtggtttttattttttatctggttttgtggtcttcgt

SEQ ID NO: 151 - protein, 229 aa, Artificial Sequence
  Synthetic: Amino acid sequence for VSV-M protein in rVSV-delta-G-SARS-CoV-2 clone MB1
MSSLKKILGLKGKGKKSKKLGIAPPPYEEDTSMEYAPSAPIDKSYFGVDEMDTYDPNQLRSEKFFFTVKMTVRSNRPFRTYSDVAAAVSHWDHMYIGMAGKRPFYKILAFLGSSNLKATPAVLADQGQPEYHAHCEGRAYLPHRMGKTPPMLNVPEHFRRPFNIGLYKGTIELTMTIYDDESLEAAPMIWDHFNSSKFSDFREKALMFGLIVEKKASGAWVLDSIGHFK

SEQ ID NO: 152 - protein, 2109 aa, Artificial Sequence
  Synthetic: Amino acid sequence for VSV-L protein in rVSV-delta-G-SARS-CoV-2 clone MB1, MB2, and Vectors A and B
MEVHDFETDEFNDFNEDDYATREFLNPDERMTYLNHADYNLNSPLISDDIDNLIRKFNSLPIPSMWDSKNWDGVLEMLTSCQANPIPTSQMHKWMGSWLMSDNHDASQGYSFLHEVDKEAEITFDVVETFIRGWGNKPIEYIKKERWTDSFKILAYLCQKFLDLHKLTLILNAVSEVELLNLARTFKGKVRRSSHGTNICRIRVPSLGPTFISEGWAYFKKLDILMDRNFLLMVKDVIIGRMQTVLSMVCRIDNLFSEQDIFSLLNIYRIGDKIVERQGNFSYDLIKMVEPICNLKLMKLARESRPLVPQFPHFENHIKTSVDEGAKIDRGIRFLHDQIMSVKTVDLTLVIYGSFRHWGHPFIDYYTGLEKLHSQVTMKKDIDVSYAKALASDLARIVLFQQFNDHKKWFVNGDLLPHDHPFKSHVKENTWPTAAQVQDFGDKWHELPLIKCFEIPDLLDPSIIYSDKSHSMNRSEVLKHVRMNPNTPIPSKKVLQTMLDTKATNWKEFLKEIDEKGLDDDDLIIGLKGKERELKLAGRFFSLMSWKLREYFVITEYLIKTHFVPMFKGLTMADDLTAVIKKMLDSSSGQGLKSYEAICIANHIDYEKWNNHQRKLSNGPVFRVMGQFLGYPSLIERTHEFFEKSLIYYNGRPDLMRVHNNTLINSTSQRVCWQGQEGGLEGLRQKGWSILNLLVIQREAKIRNTAVKVLAQGDNQVICTQYKTKKSRNVVELQGALNQMVSNNEKIMTAIKIGTGKLGLLINDDETMQSADYLNYGKIPIFRGVIRGLETKRWSRVTCVTNDQIPTCANIMSSVSTNALTVAHFAENPINAMIQYNYFGTFARLLLMMHDPALRQSLYEVQDKIPGLHSSTFKYAMLYLDPSIGGVSGMSLSRFLIRAFPDPVTESLSFWRFIHVHARSEHLKEMSAVFGNPEIAKFRITHIDKLVEDPTSLNIAMGMSPANLLKTEVKKCLIESRQTIRNQVIKDATIYLYHEEDRLRSFLWSINPLFPRFLSEFKSGTFLGVADGLISLFQNSRTIRNSFKKKYHRELDDLIVRSEVSSLTHLGKLHLRRGSCKMWTCSATHADTLRYKSWGRTVIGTTVPHPLEMLGPQHRKETPCAPCNTSGFNYVSVHCPDGIHDVFSSRGPLPAYLGSKTSESTSILQPWERESKVPLIKRATRLRDAISWFVEPDSKLAMTILSNIHSLTGEEWTKRQHGFKRTGSALHRFSTSRMSHGGFASQSTAALTRLMATTDTMRDLGDQNFDFLFQATLLYAQITTTVARDGWITSCTDHYHIACKSCLRPIEEITLDSSMDYTPPDVSHVLKTWRNGEGSWGQEIKQIYPLEGNWKNLAPAEQSYQVGRCIGFLYGDLAYRKSTHAEDSSLFPLSIQGRIRGRGFLKGLLDGLMRASCCQVIHRRSLAHLKRPANAVYGGLIYLIDKLSVSPPFLSLTRSGPIRDELETIPHKIPTSYPTSNRDMGVIVRNYFKYQCRLIEKGKYRSHYSQLWLFSDVLSIDFIGPFSISTTLLQILYKPFLSGKDKNELRELANLSSLLRSGEGWEDIHVKFFTKDILLCPEEIRHACKFGIAKDNNKDMSYPPWGRESRGTITTIPVYYTTTPYPKMLEMPPRIQNPLLSGIRLGQLPTGAHYKIRSILHGMGIHYRDFLSCGDGSGGMTAALLRENVHSRGIFNSLLELSGSVMRGASPEPPSALETLGGDKSRCVNGETCWEYPSDLCDPRTWDYFLRLKAGLGLQIDLIVMDMEVRDSSTSLKIETNVRNYVHRILDEQGVLIYKTYGTYICESEKNAVTILGPMFKTVDLVQTEFSSSQTSEVYMVCKGLKKLIDEPNPDWSSINESWKNLYAFQSSEQEFARAKKVSTYFTLTGIPSQFIPDPFVNIETMLQIFGVPTGVSHAAALKSSDRPADLLTISLFYMAIISYYNINHIRVGPIPPNPPSDGIAQNVGIAITGISFWLSLMEKDIPLYQQCLAVIQQSFPIRWEAVSVKGGYKQKWSTRGDGLPKDTRISDSLAPIGNWIRSLELVRNQVRLNPFNEILFNQLCRTVDNHLKWSNLRRNTGMIEWINRRISKEDRSILMLKSDLHEENSWRD

SEQ ID NO: 153 - protein, 1250 aa, Artificial Sequence
  Synthetic: Amino acid sequence for SARS-CoV-2 S protein in rVSV-delta-G-SARS-CoV-2 clone MB1
MFVFLVLLPLVSSQCVNLTTRTQLPPAYTNSFTRGVYYPDKVFRSSVLHSTQDLFLPFFSNVTWFHAIHVSGTNGTKRFDNPVLPFNDGVYFASTEKSNIIRGWIFGTTLDSKTQSLLIVNNATNVVIKVCEFQFCNDPFLGVYYHKNNKSWMESEFRVYSSANNCTFEYVSQPFLMDLEGKQGNFKNLREFVFKNIDGYFKIYSKHTPINLVRDLPQGFSALEPLVDLPIGINITRFQTLLALHRSYLTPGDSSSGWTAGAAAYYVGYLQPRTFLLKYNENGTITDAVDCALDPLSETKCTLKSFTVEKGIYQTSNFRVQPTESIVRFPNITNLCPFGEVFNATRFASVYAWNRKRISNCVADYSVLYNSASFSTFKCYGVSPTKLNDLCFTNVYADSFVIRGDEVRQIAPGQTGKIADYNYKLPDDFTGCVIAWNSNNLDSKVGGNYNYLYRLFRKSNLKPFERDISTEIYQAGSTPCNGVEGFNCYFPLQSYGFQPTNGVGYQPYRVVVLSFELLHAPATVCGPKKSTNLVKNKCVNFNFNGLTGTGVLTESNKKFLPFQQFGRDIADTTDAVRDPQTLEILDITPCSFGGVSVITPGTNTSNQVAVLYQDVNCTEVPVAIHADQLTPTWRVYSTGSNVFQTRAGCLIGAEHVNNSYECDIPIGAGICASYQTQTNSPRGARSVASQSIIAYTMSLGAENSVAYSNNSIAIPTNFTISVTTEILPVSMTKTSVDCTMYICGDSTECSNLLLQYGSFCTQLNRALTGIAVEQDKNTQEVFAQVKQIYKTPPIKDFGGFNFSQILPDPSKPFKRSFIEDLLFNKVTLADAGFIKQYGDCLGDIAARDLICAQKFNGLTVLPPLLTDEMIAQYTSALLAGTITSGWTFGAGAALQIPFAMQMAYRFNGIGVTQNVLYENQKLIANQFNSAIGKIQDSLSSTASALGKLQDVVNQNAQALNTLVKQLSSNFGAISSVLNDILSRLDKVEAEVQIDRLITGRLQSLQTYVTQQLIRAAEIRASANLAATKMSECVLGQSKRVDFCGKGYHLMSFPQSAPHGVVFLHVTYVPAQEKNFTTAPAICHDGKAHFPREGVFVSNGTHWFVTQRNFYEPQIITTDNTFVSGNCDVVIGIVNNTVYDPLQPELDSFKEELDKYFKNHTSPDVDLGDISGINASVVNIQKEIDRLNEVAKNLNESLIDLQELGKYEQYIKWPWYIWLGFIAGLIAIVMVTIMLCCMTSCCSCLKGCCSC

SEQ ID NO: 154 - DNA, 13440 bp, Artificial Sequence
  Synthetic: Nucleotide sequence for rVSV-delta-G-SARS-CoV-2 clone MB2
acgaagacaaacaaaccattattatcattaaaaggctcaggagaaactttaacagtaatcaaaatgtctgttacagtcaagagaatcattgacaacacagtcgtagttccaaaacttcctgcaaatgaggatccagtggaatacccggcagattacttcagaaaatcaaaggagattcctctttacatcaatactacaaaaagtttgtcagatctaagaggatatgtctaccaaggcctcaaatccggaaatgtatcaatcatacatgtcaacagctacttgtatggagcattaaaggacatccggggtaagttggataaagattggtcaagtttcggaataaacatcgggaaagcaggggatacaatcggaatatttgaccttgtatccttgaaagccctggacggcgtacttccagatggagtatcggatgcttccagaaccagcgcagatgacaaatggttgcctttgtatctacttggcttatacagagtgggcagaacacaaatgcctgaatacagaaaaaagctcatggatgggctgacaaatcaatgcaaaatgatcaatgaacagtttgaacctcttgtgccagaaggtcgtgacatttttgatgtgtggggaaatgacagtaattacacaaaaattgtcgctgcagtggacatgttcttccacatgttcaaaaaacatgaatgtgcctcgttcagatacggaactattgtttccagattcaaagattgtgctgcattggcaacatttggacacctctgcaaaataaccggaatgtctacagaagatgtaacgacctggatcttgaaccgagaagttgcagatgaaatggtccaaatgatgcttccaggccaagaaattgacaaggccgattcatacatgccttatttgatcgactttggattgtcttctaagtctccatattcttccgtcaaaaaccctgccttccacttctgggggcaattgacagctcttctgctcagatccaccagagcaaggaatgcccgacagcctgatgacattgagtatacatctcttactacagcaggtttgttgtacgcttatgcagtaggatcctctgccgacttggcacaacagttttgtgttggagataacaaatacactccagatgatagtaccggaggattgacgactaatgcaccgccacaaggcagagatgtggtcgaatggctcggatggtttgaagatcaaaacagaaaaccgactcctgatatgatgcagtatgcgaaaagagcagtcatgtcactgcaaggcctaagagagaagacaattggcaagtatgctaagtcagaatttgacaaatgaccctataattctcagatcacctattatatattatgctacatatgaaaaaaactaacagatatcatggataatctcacaaaagttcgtgagtatctcaagtcctattctcgtctggatcaggcggtaggagagatagatgagatcgaagcacaacgagctgaaaagtccaattatgagttgttccaagaggatggagtggaagagcatactaagccctcttattttcaggcagcagatgattctgacacagaatctgaaccagaaattgaagacaatcaaggcttgtatgcaccagatccagaagctgagcaagttgaaggctttatacaggggcctttagatgactatgcagatgaggaagtggatgttgtatttacttcggactggaaacagcctgagcttgaatctgacgagcatggaaagaccttacggttgacatcgccagagggtttaagtggagagcagaaatcccagtggctttcgacgattaaagcagtcgtgcaaagtgccaaatactggaatctggcagagtgcacatttgaagcatcgggagaaggggtcattatgaaggagcgccagataactccggatgtatataaggtcactccagtgatgaacacacatccgtcccaatcagaagcagtatcagatgtttggtctctctcaaagacatccatgactttccaacccaagaaagcaagtcttcagcctctcaccatatccttggatgaattgttctcatctagaggagagttcatctctgtcggaggtgacggacgaatgtctcataaagaggccatcctgctcggcctgagatacaaaaagttgtacaatcaggcgagagtcaaatattctctgtagactatgaaaaaaagtaacagatatcacgatctaagtgttatcccaatccattcatcatgagttccttaaagaagattctcggtctgaaggggaaaggtaagaaatctaagaaattagggatcgcaccacccccttatgaagaggacactagcatggagtatgctccgagcgctccaattgacaaatcctattttggagttgacgagatggacacctatgatccgaatcaattaagatatgagaaattcttctttacagtgaaaatgacggttagatctaatcgtccgttcagaacatactcagatgtggcagccgctgtatcccattgggatcacatgtacatcggaatggcagggaaacgtcccttctacaaaatcttggcttttttgggttcttctaatctaaaggccactccagcggtattggcagatcaaggtcaaccagagtatcacgctcactgcgaaggcagggcttatttgccacataggatggggaagacccctcccatgctcaatgtaccagagcacttcagaagaccattcaatataggtctttacaagggaacgattgagctcacaatgaccatctacgatgatgagtcactggaagcagctcctatgatctgggatcatttcaattcttccaaattttctgatttcagagagaaggccttaatgtttggcctgattgtcgagaaaaaggcatctggagcgtgggtcctggactctatcggccacttcaaatgagctagtctaacttctagcttctgaacaatccccggtttactcagtctcccctaattccagcctctcgaacaactaatatcctgtcttttctatccctatgaaaaaaactaacagagatcgatctgtttacgcgctagtggatcctactcgagaggagccaccatgttcgtgttcctggtgctattacctctggtttcgtctcaatgcgtaaaccttacaactagaactcagcttcctccagcatacacaaattccttcactcgcggagtgtattatcctgataaggtctttcgatcatcagtgttgcattccacccaggatttgtttctcccgttcttttcaaatgtaacttggttccatgctatacatgtttccggaaccaatggaacaaagagatttgataacccagtgttaccatttaacgacggagtttatttcgcatcaactgagaaatccaatatcattagaggctggattttcggaacgaccctggattctaaaacgcaatccttgctgattgttaataatgcaacaaatgtggtcattaaagtctgtgaattccaattttgcaatgatccatttctcggcgtctattaccacaagaataacaaatcttggatggagtcagagttcagggtttatagttccgcaaataattgtacttttgaatacgtttcccaaccattcttaatggacttggagggaaaacagggaaattttaagaatctaagagaattcgtctttaagaatattgatggatatttcaagatctattcaaaacatacacctataaacctagttagagatctcccgcaagggttttcagccctagagccactagttgacctgccaattgggatcaacattactagattccagaccctactcgctctgcatcggtcatatttgacaccaggagattcatcgtcaggatggaccgctggagcagctgcttactatgttgggtatctgcaacctagaacatttctcctaaagtataatgaaaacgggactattacagacgcagtcgattgcgcactggatccactctcagagacaaagtgcactctaaaatcattcactgtcgagaaaggaatctatcaaacatcaaatttcagggtccagccaactgagagtattgtccggttccctaacataactaacttgtgccccttcggagaggttttcaatgctactcggttcgccagcgtctacgcatggaacagaaagaggatttcaaactgtgtcgcagattatagcgtcctctataattcagcatcattcagtacatttaaatgctatggtgtcagccccaccaaacttaatgacttatgttttaccaatgtatatgcagattcctttgtaatcagaggtgacgaagtgaggcaaatcgcacctggacagaccggaaagattgctgattataattataaactccctgatgattttaccggatgtgttattgcttggaacagcaataacctcgatagtaaggtcggaggaaactataactatttgtacagactgtttagaaagtcgaatttgaaaccttttgaaagagacatatccaccgagatttaccaggcgggcagcacaccgtgtaatggtgtagaaggattcaattgttactttcccctgcaatcatatgggtttcaaccaaccaatggagtcggatatcaaccatatcgtgtcgtcgtcctttccttcgagctgcttcatgcaccagctacagtctgcggacctaagaagagcactaatcttgtcaagaacaaatgtgtgaactttaattttaatggattaacaggaaccggagttttgaccgagagtaataagaagttcttgccgttccagcaatttggacgagacattgctgacaccacagatgcggttcgtgacccgcaaactttagagatcctagacatcaccccatgttcattcggtggagtttccgttattactcctggaacgaatacaagcaatcaagttgccgttctctatcaagatgttaattgtacagaagtgcctgtggccattcatgcagatcaactaacaccaacttggagagtttacagcactgggtccaatgtcttccaaacgcgcgccggctgcctcattggtgcagaatatgtgaataactcatacgaatgtgacattccaatcggtgccggcatatgcgcctcttaccagactcagactaattcgccaagaagagccaggtctgtcgcaagtcagtcaattattgcatacacaatgtcgttaggagcagagaatagtgtagcatactcaaacaattctatagcaatacctaccaacttcactatatcagtaactacagaaatattgccagtatccatgactaaaacaagtgtggattgcaccatgtacatctgtggagattccacagaatgcagcaatcttctcttgcaatacggatcattctgcacacaactgaatagggcactgactggaattgcagtcgagcaggataagaacacacaggaggtgtttgcccaagtcaaacaaatatacaaaacaccacccatcaaggattttggaggatttaatttctcacaaatactccccgacccatccaagccctccaaaaggagtttcattgaggacctcttgtttaataaggttaccttggcagatgccgggtttattaagcagtacggcgactgtcttggagacatagcagccagagatctaatttgtgcccagaaattcaatggactgacagtcctgcctcccttattaactgatgagatgatagctcagtatacatcagcattgttggctggtacaattacatctggatggacatttggtgccggagcggcattacaaatcccttttgcaatgcaaatggcctatagatttaatggaatcggagtaactcaaaatgttttatatgagaatcagaaattaattgcaaatcaattcaattcagctataggaaagattcaggattcactcagtagtacagcaagcgctctaggcaaattacaagacgtcgtcaatcagaatgcacaggcattaaatacactggtgaagcaattgagttccaatttcggagcaatttcatctgttctaaatgatatattgtcaagactggataaagtagaagccgaggtccaaatcgataggctgatcacaggaagacttcaatcactacagacatacgtcacccaacaactcatcagagcagcagaaattagagcctctgctaatctagccgcaacaaagatgtcagagtgcgtattgggacaatctaagagggtcgacttttgtggaaaggggtatcacttgatgtcctttcctcaatctgcaccacacggagttgtcttcttacatgtaacatatgtgcccgctcaagaaaagaatttcactacagcacctgcaatatgtcatgacggaaaagcacattttcctcgggagggagttttcgtttctaatggaacccattggttcgtgacccaaaggaacttttacgagcctcaaataattacaactgataatacattcgtttctggaaattgcgacgtagttataggtattgtaaataatactgtttatgaccctttacaacctgaactcgattccttcaaggaagaactcgacaaatattttaagaatcacacctcaccggacgttgacttaggagacatttccgggattaacgctagtgtagtcaatatccaaaaggagatagatagactgaatgaggtagcaaagaatcttaatgaatctttgatcgaccttcaggagctggggaagtacgaacaatacataaaatggccatggtacatttggctcgggtttattgctggactaattgcaatagtcatggtcactatcatgctgtgttgtatgacatcgtgctgctcatgcctcaagggatgttgtagctgttgatcttgttgcaagttcgatgaggatgattcagaaccagttttaaaaggagtaaagttgcattacacataaaggctagctgtttacgcgttatccatgctcaaagaggcctcaattatatttgagtttttaatttttatgaaaaaaactaacagcaatcatggaagtccacgattttgagaccgacgagttcaatgatttcaatgaagatgactatgccacaagagaattcctgaatcccgatgagcgcatgacgtacttgaatcatgctgattacaacctgaattctcctctaattagtgatgatattgacaatttaatcaggaaattcaattctcttccaattccctcgatgtgggatagtaagaactgggatggagttcttgagatgttaacgtcatgtcaagccaatcccatcccaacatctcagatgcataaatggatgggaagttggttaatgtctgataatcatgatgccagtcaagggtatagttttttacatgaagtggacaaagaggcagaaataacatttgacgtggtggagaccttcatccgcggctggggcaacaaaccaattgaatacatcaaaaaggaaagatggactgactcattcaaaattctcgcttatttgtgtcaaaagtttttggacttacacaagttgacattaatcttaaatgctgtctctgaggtggaattgctcaacttggcgaggactttcaaaggcaaagtcagaagaagttctcatggaacgaacatatgcaggattagggttcccagcttgggtcctacttttatttcagaaggatgggcttacttcaagaaacttgatattctaatggaccgaaactttctgttaatggtcaaagatgtgattatagggaggatgcaaacggtgctatccatggtatgtagaatagacaacctgttctcagagcaagacatcttctcccttctaaatatctacagaattggagataaaattgtggagaggcagggaaatttttcttatgacttgattaaaatggtggaaccgatatgcaacttgaagctgatgaaattagcaagagaatcaaggcctttagtcccacaattccctcattttgaaaatcatatcaagacttctgttgatgaaggggcaaaaattgaccgaggtataagattcctccatgatcagataatgagtgtgaaaacagtggatctcacactggtgatttatggatcgttcagacattggggtcatccttttatagattattacactggactagaaaaattacattcccaagtaaccatgaagaaagatattgatgtgtcatatgcaaaagcacttgcaagtgatttagctcggattgttctatttcaacagttcaatgatcataaaaagtggttcgtgaatggagacttgctccctcatgatcatccctttaaaagtcatgttaaagaaaatacatggcccacagctgctcaagttcaagattttggagataaatggcatgaacttccgctgattaaatgttttgaaatacccgacttactagacccatcgataatatactctgacaaaagtcattcaatgaataggtcagaggtgttgaaacatgtccgaatgaatccgaacactcctatccctagtaaaaaggtgttgcagactatgttggacacaaaggctaccaattggaaagaatttcttaaagagattgatgagaagggcttagatgatgatgatctaattattggtcttaaaggaaaggagagggaactgaagttggcaggtagatttttctccctaatgtcttggaaattgcgagaatactttgtaattaccgaatatttgataaagactcatttcgtccctatgtttaaaggcctgacaatggcggacgatctaactgcagtcattaaaaagatgttagattcctcatccggccaaggattgaagtcatatgaggcaatttgcatagccaatcacattgattacgaaaaatggaataaccaccaaaggaagttatcaaacggcccagtgttccgagttatgggccagttcttaggttatccatccttaatcgagagaactcatgaattttttgagaaaagtcttatatactacaatggaagaccagacttgatgcgtgttcacaacaacacactgatcaattcaacctcccaacgagtttgttggcaaggacaagagggtggactggaaggtctacggcaaaaaggatggagtatcctcaatctactggttattcaaagagaggctaaaatcagaaacactgctgtcaaagtcttggcacaaggtgataatcaagttatttgcacacagtataaaacgaagaaatcgagaaacgttgtagaattacagggtgctctcaatcaaatggtttctaataatgagaaaattatgactgcaatcaaaatagggacagggaagttaggacttttgataaatgacgatgagactatgcaatctgcagattacttgaattatggaaaaataccgattttccgtggagtgattagagggttagagaccaagagatggtcacgagtgacttgtgtcaccaatgaccaaatacccacttgtgctaatataatgagctcagtttccacaaatgctctcaccgtagctcattttgctgagaacccaatcaatgccatgatacagtacaattattttgggacatttgctagactcttgttgatgatgcatgatcctgctcttcgtcaatcattgtatgaagttcaagataagataccaggcttgcacagttctactttcaaatacgccatgttgtatttggacccttccattggaggagtgtcgggcatgtctttgtccaggtttttgattagagccttcccagatcccgtaacagaaagtctctcattctggagattcatccatgtacatgctcgaagtgagcatctgaaggagatgagtgcagtatttggaaaccccgagatagccaagtttcgaataactcacatagacaagctagtagaagatccaacctctctgaacatcgctatgggaatgagtccagcgaacttgttaaagactgaggttaaaaaatgcttaatcgaatcaagacaaaccatcaggaaccaggtgattaaggatgcaaccatatatttgtatcatgaagaggatcggctcagaagtttcttatggtcaataaatcctctgttccctagatttttaagtgaattcaaatcaggcacttttttgggagtcgcagacgggctcatcagtctatttcaaaattctcgtactattcggaactcctttaagaaaaagtatcatagggaattggatgatttgattgtgaggagtgaggtatcctctttgacacatttagggaaacttcatttgagaaggggatcatgtaaaatgtggacatgttcagctactcatgctgacacattaagatacaaatcctggggccgtacagttattgggacaactgtaccccatccattagaaatgttgggtccacaacatcgaaaagagactccttgtgcaccatgtaacacatcagggttcaattatgtttctgtgcattgtccagacgggatccatgacgtctttagttcacggggaccattgcctgcttatctagggtctaaaacatctgaatctacatctattttgcagccttgggaaagggaaagcaaagtcccactgattaaaagagctacacgtcttagagatgctatctcttggtttgttgaacccgactctaaactagcaatgactatactttctaacatccactctttaacaggcgaagaatggaccaaaaggcagcatgggttcaaaagaacagggtctgcccttcataggttttcgacatctcggatgagccatggtgggttcgcatctcagagcactgcagcattgaccaggttgatggcaactacagacaccatgagggatctgggagatcagaatttcgactttttattccaagcaacgttgctctatgctcaaattaccaccactgttgcaagagacggatggatcaccagttgtacagatcattatcatattgcctgtaagtcctgtttgagacccatagaagagatcaccctggactcaagtatggactacacgcccccagatgtatcccatgtgctgaagacatggaggaatggggaaggttcgtggggacaagagataaaacagatatatcctttagaagggaattggaagaatttagcacctgctgagcaatcctatcaagtcggcagatgtataggttttctatatggagacttggcgtatagaaaatctactcatgccgaggacagttctctatttcctctatctatacaaggtcgtattagaggtcgaggtttcttaaaagggttgctagacggattaatgagagcaagttgctgccaagtaatacaccggagaagtctggctcatttgaagaggccggccaacgcagtgtacggaggtttgatttacttgattgataaattgagtgtatcacctccattcctttctcttactagatcaggacctattagagacgaattagaaacgattccccacaagatcccaacctcctatccgacaagcaaccgtgatatgggggtgattgtcagaaattacttcaaataccaatgccgtctaattgaaaagggaaaatacagatcacattattcacaattatggttattctcagatgtcttatccatagacttcattggaccattctctatttccaccaccctcttgcaaatcctatacaagccatttttatctgggaaagataagaatgagttgagagagctggcaaatctttcttcattgctaagatcaggagaggggtgggaagacatacatgtgaaattcttcaccaaggacatattattgtgtccagaggaaatcagacatgcttgcaagttcgggattgctaaggataataataaagacatgagctatcccccttggggaagggaatccagagggacaattacaacaatccctgtttattatacgaccaccccttacccaaagatgctagagatgcctccaagaatccaaaatcccctgctgtccggaatcaggttgggccaattaccaactggcgctcattataaaattcggagtatattacatggaatgggaatccattacagggacttcttgagttgtggagacggctccggagggatgactgctgcattactacgagaaaatgtgcatagcagaggaatattcaatagtctgttagaattatcagggtcagtcatgcgaggcgcctctcctgagccccccagtgccctagaaactttaggaggagataaatcgagatgtgtaaatggtgaaacatgttgggaatatccatctgacttatgtgacccaaggacttgggactatttcctccgactcaaagcaggcttggggcttcaaattgatttaattgtaatggatatggaagttcgggattcttctactagcctgaaaattgagacgaatgttagaaattatgtgcaccggattttggatgagcaaggagttttaatctacaagacttatggaacatatatttgtgagagcgaaaagaatgcagtaacaatccttggtcccatgttcaagacggtcgacttagttcaaacagaatttagtagttctcaaacgtctgaagtatatatggtatgtaaaggtttgaagaaattaatcgatgaacccaatcccgattggtcttccatcaatgaatcctggaaaaacctgtacgcattccagtcatcagaacaggaatttgccagagcaaagaaggttagtacatactttaccttgacaggtattccctcccaattcattcctgatccttttgtaaacattgagactatgctacaaatattcggagtacccacgggtgtgtctcatgcggctgccttaaaatcatctgatagacctgcagatttattgaccattagccttttttatatggcgattatatcgtattataacatcaatcatatcagagtaggaccgatacctccgaaccccccatcagatggaattgcacaaaatgtggggatcgctataactggtataagcttttggctgagtttgatggagaaagacattccactatatcaacagtgtttagcagttatccagcaatcattcccgattaggtgggaggctgtttcagtaaaaggaggatacaagcagaagtggagtactagaggtgatgggctcccaaaagatacccgaatttcagactccttggccccaatcgggaactggatcagatctctggaattggtccgaaaccaagttcgtctaaatccattcaatgagatcttgttcaatcagctatgtcgtacagtggataatcatttgaaatggtcaaatttgcgaagaaacacaggaatgattgaatggatcaatagacgaatttcaaaagaagaccggtctatactgatgttgaagagtgacctacacgaggaaaactcttggagagattaaaaaatcatgaggagactccaaactttaagtatgaaaaaaactttgatccttaagaccctcttgtggtttttattttttatctggttttgtggtcttcgt

SEQ ID NO: 155 - protein, 422 aa, Artificial Sequence
  Synthetic: Amino acid sequence for VSV-N protein in rVSV-delta-G-SARS-CoV-2 clones MB1 and MB2, and Vectors A and B
MSVTVKRIIDNTVVVPKLPANEDPVEYPADYFRKSKEIPLYINTTKSLSDLRGYVYQGLKSGNVSIIHVNSYLYGALKDIRGKLDKDWSSFGINIGKAGDTIGIFDLVSLKALDGVLPDGVSDASRTSADDKWLPLYLLGLYRVGRTQMPEYRKKLMDGLTNQCKMINEQFEPLVPEGRDIFDVWGNDSNYTKIVAAVDMFFHMFKKHECASFRYGTIVSRFKDCAALATFGHLCKITGMSTEDVTTWILNREVADEMVQMMLPGQEIDKADSYMPYLIDFGLSSKSPYSSVKNPAFHFWGQLTALLLRSTRARNARQPDDIEYTSLTTAGLLYAYAVGSSADLAQQFCVGDNKYTPDDSTGGLTTNAPPQGRDVVEWLGWFEDQNRKPTPDMMQYAKRAVMSLQGLREKTIGKYAKSEFDK

SEQ ID NO: 156 - protein, 265 aa, Artificial Sequence
  Synthetic: Amino acid sequence for VSV-P protein in rVSV-delta-G-SARS-CoV-2 clones MB1 and MB2, and Vectors A and B
MDNLTKVREYLKSYSRLDQAVGEIDEIEAQRAEKSNYELFQEDGVEEHTKPSYFQAADDSDTESEPEIEDNQGLYAPDPEAEQVEGFIQGPLDDYADEEVDVVFTSDWKQPELESDEHGKTLRLTSPEGLSGEQKSQWLSTIKAVVQSAKYWNLAECTFEASGEGVIMKERQITPDVYKVTPVMNTHPSQSEAVSDVWSLSKTSMTFQPKKASLQPLTISLDELFSSRGEFISVGGDGRMSHKEAILLGLRYKKLYNQARVKYSL

SEQ ID NO: 157 - protein, 229 aa, Artificial Sequence
  Synthetic: Amino acid sequence for VSV-M protein in rVSV-delta-G-SARS-CoV-2 clone MB2, and Vectors A and B
MSSLKKILGLKGKGKKSKKLGIAPPPYEEDTSMEYAPSAPIDKSYFGVDEMDTYDPNQLRYEKFFFTVKMTVRSNRPFRTYSDVAAAVSHWDHMYIGMAGKRPFYKILAFLGSSNLKATPAVLADQGQPEYHAHCEGRAYLPHRMGKTPPMLNVPEHFRRPFNIGLYKGTIELTMTIYDDESLEAAPMIWDHFNSSKFSDFREKALMFGLIVEKKASGAWVLDSIGHFK

SEQ ID NO: 158 - protein, 1250 aa, Artificial Sequence
  Synthetic: Amino acid sequence for SARS-CoV-2 S protein in rVSV-delta-G-SARS-CoV-2 clone MB2
MFVFLVLLPLVSSQCVNLTTRTQLPPAYTNSFTRGVYYPDKVFRSSVLHSTQDLFLPFFSNVTWFHAIHVSGTNGTKRFDNPVLPFNDGVYFASTEKSNIIRGWIFGTTLDSKTQSLLIVNNATNVVIKVCEFQFCNDPFLGVYYHKNNKSWMESEFRVYSSANNCTFEYVSQPFLMDLEGKQGNFKNLREFVFKNIDGYFKIYSKHTPINLVRDLPQGFSALEPLVDLPIGINITRFQTLLALHRSYLTPGDSSSGWTAGAAAYYVGYLQPRTFLLKYNENGTITDAVDCALDPLSETKCTLKSFTVEKGIYQTSNFRVQPTESIVRFPNITNLCPFGEVFNATRFASVYAWNRKRISNCVADYSVLYNSASFSTFKCYGVSPTKLNDLCFTNVYADSFVIRGDEVRQIAPGQTGKIADYNYKLPDDFTGCVIAWNSNNLDSKVGGNYNYLYRLFRKSNLKPFERDISTEIYQAGSTPCNGVEGFNCYFPLQSYGFQPTNGVGYQPYRVVVLSFELLHAPATVCGPKKSTNLVKNKCVNFNFNGLTGTGVLTESNKKFLPFQQFGRDIADTTDAVRDPQTLEILDITPCSFGGVSVITPGTNTSNQVAVLYQDVNCTEVPVAIHADQLTPTWRVYSTGSNVFQTRAGCLIGAEYVNNSYECDIPIGAGICASYQTQTNSPRRARSVASQSIIAYTMSLGAENSVAYSNNSIAIPTNFTISVTTEILPVSMTKTSVDCTMYICGDSTECSNLLLQYGSFCTQLNRALTGIAVEQDKNTQEVFAQVKQIYKTPPIKDFGGFNFSQILPDPSKPSKRSFIEDLLFNKVTLADAGFIKQYGDCLGDIAARDLICAQKFNGLTVLPPLLTDEMIAQYTSALLAGTITSGWTFGAGAALQIPFAMQMAYRFNGIGVTQNVLYENQKLIANQFNSAIGKIQDSLSSTASALGKLQDVVNQNAQALNTLVKQLSSNFGAISSVLNDILSRLDKVEAEVQIDRLITGRLQSLQTYVTQQLIRAAEIRASANLAATKMSECVLGQSKRVDFCGKGYHLMSFPQSAPHGVVFLHVTYVPAQEKNFTTAPAICHDGKAHFPREGVFVSNGTHWFVTQRNFYEPQIITTDNTFVSGNCDVVIGIVNNTVYDPLQPELDSFKEELDKYFKNHTSPDVDLGDISGINASVVNIQKEIDRLNEVAKNLNESLIDLQELGKYEQYIKWPWYIWLGFIAGLIAIVMVTIMLCCMTSCCSCLKGCCSC

SEQ ID NO: 159 - DNA, 13441 bp, Artificial Sequence
  Synthetic: Nucleotide sequence for rVSV-delta-G-SARS-CoV-2 with codon-optimized, wild-type S protein
acgaagacaaacaaaccattattatcattaaaaggctcaggagaaactttaacagtaatcaaaatgtctgttacagtcaagagaatcattgacaacacagtcgtagttccaaaacttcctgcaaatgaggatccagtggaatacccggcagattacttcagaaaatcaaaggagattcctctttacatcaatactacaaaaagtttgtcagatctaagaggatatgtctaccaaggcctcaaatccggaaatgtatcaatcatacatgtcaacagctacttgtatggagcattaaaggacatccggggtaagttggataaagattggtcaagtttcggaataaacatcgggaaagcaggggatacaatcggaatatttgaccttgtatccttgaaagccctggacggcgtacttccagatggagtatcggatgcttccagaaccagcgcagatgacaaatggttgcctttgtatctacttggcttatacagagtgggcagaacacaaatgcctgaatacagaaaaaagctcatggatgggctgacaaatcaatgcaaaatgatcaatgaacagtttgaacctcttgtgccagaaggtcgtgacatttttgatgtgtggggaaatgacagtaattacacaaaaattgtcgctgcagtggacatgttcttccacatgttcaaaaaacatgaatgtgcctcgttcagatacggaactattgtttccagattcaaagattgtgctgcattggcaacatttggacacctctgcaaaataaccggaatgtctacagaagatgtaacgacctggatcttgaaccgagaagttgcagatgaaatggtccaaatgatgcttccaggccaagaaattgacaaggccgattcatacatgccttatttgatcgactttggattgtcttctaagtctccatattcttccgtcaaaaaccctgccttccacttctgggggcaattgacagctcttctgctcagatccaccagagcaaggaatgcccgacagcctgatgacattgagtatacatctcttactacagcaggtttgttgtacgcttatgcagtaggatcctctgccgacttggcacaacagttttgtgttggagataacaaatacactccagatgatagtaccggaggattgacgactaatgcaccgccacaaggcagagatgtggtcgaatggctcggatggtttgaagatcaaaacagaaaaccgactcctgatatgatgcagtatgcgaaaagagcagtcatgtcactgcaaggcctaagagagaagacaattggcaagtatgctaagtcagaatttgacaaatgaccctataattctcagatcacctattatatattatgctacatatgaaaaaaactaacagatatcatggataatctcacaaaagttcgtgagtatctcaagtcctattctcgtctggatcaggcggtaggagagatagatgagatcgaagcacaacgagctgaaaagtccaattatgagttgttccaagaggatggagtggaagagcatactaagccctcttattttcaggcagcagatgattctgacacagaatctgaaccagaaattgaagacaatcaaggcttgtatgcaccagatccagaagctgagcaagttgaaggctttatacaggggcctttagatgactatgcagatgaggaagtggatgttgtatttacttcggactggaaacagcctgagcttgaatctgacgagcatggaaagaccttacggttgacatcgccagagggtttaagtggagagcagaaatcccagtggctttcgacgattaaagcagtcgtgcaaagtgccaaatactggaatctggcagagtgcacatttgaagcatcgggagaaggggtcattatgaaggagcgccagataactccggatgtatataaggtcactccagtgatgaacacacatccgtcccaatcagaagcagtatcagatgtttggtctctctcaaagacatccatgactttccaacccaagaaagcaagtcttcagcctctcaccatatccttggatgaattgttctcatctagaggagagttcatctctgtcggaggtgacggacgaatgtctcataaagaggccatcctgctcggcctgagatacaaaaagttgtacaatcaggcgagagtcaaatattctctgtagactatgaaaaaaagtaacagatatcacgatctaagtgttatcccaatccattcatcatgagttccttaaagaagattctcggtctgaaggggaaaggtaagaaatctaagaaattagggatcgcaccacccccttatgaagaggacactagcatggagtatgctccgagcgctccaattgacaaatcctattttggagttgacgagatggacacctatgatccgaatcaattaagatatgagaaattcttctttacagtgaaaatgacggttagatctaatcgtccgttcagaacatactcagatgtggcagccgctgtatcccattgggatcacatgtacatcggaatggcagggaaacgtcccttctacaaaatcttggcttttttgggttcttctaatctaaaggccactccagcggtattggcagatcaaggtcaaccagagtatcacgctcactgcgaaggcagggcttatttgccacataggatggggaagacccctcccatgctcaatgtaccagagcacttcagaagaccattcaatataggtctttacaagggaacgattgagctcacaatgaccatctacgatgatgagtcactggaagcagctcctatgatctgggatcatttcaattcttccaaattttctgatttcagagagaaggccttaatgtttggcctgattgtcgagaaaaaggcatctggagcgtgggtcctggactctatcggccacttcaaatgagctagtctaacttctagcttctgaacaatccccggtttactcagtctcccctaattccagcctctcgaacaactaatatcctgtcttttctatccctatgaaaaaaactaacagagatcgatctgtttacgcgctagtggatcctactcgagaggagccaccatgttcgtgttcctggtgctattacctctggtttcgtctcaatgcgtaaaccttacaactagaactcagcttcctccagcatacacaaattccttcactcgcggagtgtattatcctgataaggtctttcgatcatcagtgttgcattccacccaggatttgtttctcccgttcttttcaaatgtaacttggttccatgctatacatgtttccggaaccaatggaacaaagagatttgataacccagtgttaccatttaacgacggagtttatttcgcatcaactgagaaatccaatatcattagaggctggattttcggaacgaccctggattctaaaacgcaatccttgctgattgttaataatgcaacaaatgtggtcattaaagtctgtgaattccaattttgcaatgatccatttctcggcgtctattaccacaagaataacaaatcttggatggagtcagagttcagggtttatagttccgcaaataattgtacttttgaatacgtttcccaaccattcttaatggacttggagggaaaacagggaaattttaagaatctaagagaattcgtctttaagaatattgatggatatttcaagatctattcaaaacatacacctataaacctagttagagatctcccgcaagggttttcagccctagagccactagttgacctgccaattgggatcaacattactagattccagaccctactcgctctgcatcggtcatatttgacaccaggagattcatcgtcaggatggaccgctggagcagctgcttactatgttgggtatctgcaacctagaacatttctcctaaagtataatgaaaacgggactattacagacgcagtcgattgcgcactggatccactctcagagacaaagtgcactctaaaatcattcactgtcgagaaaggaatctatcaaacatcaaatttcagggtccagccaactgagagtattgtccggttccctaacataactaacttgtgccccttcggagaggttttcaatgctactcggttcgccagcgtctacgcatggaacagaaagaggatttcaaactgtgtcgcagattatagcgtcctctataattcagcatcattcagtacatttaaatgctatggtgtcagccccaccaaacttaatgacttatgttttaccaatgtatatgcagattcctttgtaatcagaggtgacgaagtgaggcaaatcgcacctggacagaccggaaagattgctgattataattataaactccctgatgattttaccggatgtgttattgcttggaacagcaataacctcgatagtaaggtcggaggaaactataactatttgtacagactgtttagaaagtcgaatttgaaaccttttgaaagagacatatccaccgagatttaccaggcgggcagcacaccgtgtaatggtgtagaaggattcaattgttactttcccctgcaatcatatgggtttcaaccaaccaatggagtcggatatcaaccatatcgtgtcgtcgtcctttccttcgagctgcttcatgcaccagctacagtctgcggacctaagaagagcactaatcttgtcaagaacaaatgtgtgaactttaattttaatggattaacaggaaccggagttttgaccgagagtaataagaagttcttgccgttccagcaatttggacgagacattgctgacaccacagatgcggttcgtgacccgcaaactttagagatcctagacatcaccccatgttcattcggtggagtttccgttattactcctggaacgaatacaagcaatcaagttgccgttctctatcaagatgttaattgtacagaagtgcctgtggccattcatgcagatcaactaacaccaacttggagagtttacagcactgggtccaatgtcttccaaacgcgcgccggctgcctcattggtgcagaacatgtgaataactcatacgaatgtgacattccaatcggtgccggcatatgcgcctcttaccagactcagactaattcgccaagaagagccaggtctgtcgcaagtcagtcaattattgcatacacaatgtcgttaggagcagagaatagtgtagcatactcaaacaattctatagcaatacctaccaacttcactatatcagtaactacagaaatattgccagtatccatgactaaaacaagtgtggattgcaccatgtacatctgtggagattccacagaatgcagcaatcttctcttgcaatacggatcattctgcacacaactgaatagggcactgactggaattgcagtcgagcaggataagaacacacaggaggtgtttgcccaagtcaaacaaatatacaaaacaccacccatcaaggattttggaggatttaatttctcacaaatactccccgacccatccaagccctccaaaaggagtttcattgaggacctcttgtttaataaggttaccttggcagatgccgggtttattaagcagtacggcgactgtcttggagacatagcagccagagatctaatttgtgcccagaaattcaatggactgacagtcctgcctcccttattaactgatgagatgatagctcagtatacatcagcattgttggctggtacaattacatctggatggacatttggtgccggagcggcattacaaatcccttttgcaatgcaaatggcctatagatttaatggaatcggagtaactcaaaatgttttatatgagaatcagaaattaattgcaaatcaattcaattcagctataggaaagattcaggattcactcagtagtacagcaagcgctctaggcaaattacaagacgtcgtcaatcagaatgcacaggcattaaatacactggtgaagcaattgagttccaatttcggagcaatttcatctgttctaaatgatatattgtcaagactggataaagtagaagccgaggtccaaatcgataggctgatcacaggaagacttcaatcactacagacatacgtcacccaacaactcatcagagcagcagaaattagagcctctgctaatctagccgcaacaaagatgtcagagtgcgtattgggacaatctaagagggtcgacttttgtggaaaggggtatcacttgatgtcctttcctcaatctgcaccacacggagttgtcttcttacatgtaacatatgtgcccgctcaagaaaagaatttcactacagcacctgcaatatgtcatgacggaaaagcacattttcctcgggagggagttttcgtttctaatggaacccattggttcgtgacccaaaggaacttttacgagcctcaaataattacaactgataatacattcgtttctggaaattgcgacgtagttataggtattgtaaataatactgtttatgaccctttacaacctgaactcgattccttcaaggaagaactcgacaaatattttaagaatcacacctcaccggacgttgacttaggagacatttccgggattaacgctagtgtagtcaatatccaaaaggagatagatagactgaatgaggtagcaaagaatcttaatgaatctttgatcgaccttcaggagctggggaagtacgaacaatacataaaatggccatggtacatttggctcgggtttattgctggactaattgcaatagtcatggtcactatcatgctgtgttgtatgacatcgtgctgctcatgcctcaagggatgttgtagctgtggatcttgttgcaagttcgatgaggatgattcagaaccagttttaaaaggagtaaagttgcattacacataaaggctagctgtttacgcgttatccatgctcaaagaggcctcaattatatttgagtttttaatttttatgaaaaaaaactaacagcaatcatggaagtccacgattttgagaccgacgagttcaatgatttcaatgaagatgactatgccacaagagaattcctgaatcccgatgagcgcatgacgtacttgaatcatgctgattacaacctgaattctcctctaattagtgatgatattgacaatttaatcaggaaattcaattctcttccaattccctcgatgtgggatagtaagaactgggatggagttcttgagatgttaacgtcatgtcaagccaatcccatcccaacatctcagatgcataaatggatgggaagttggttaatgtctgataatcatgatgccagtcaagggtatagttttttacatgaagtggacaaagaggcagaaataacatttgacgtggtggagaccttcatccgcggctggggcaacaaaccaattgaatacatcaaaaaggaaagatggactgactcattcaaaattctcgcttatttgtgtcaaaagtttttggacttacacaagttgacattaatcttaaatgctgtctctgaggtggaattgctcaacttggcgaggactttcaaaggcaaagtcagaagaagttctcatggaacgaacatatgcaggattagggttcccagcttgggtcctacttttatttcagaaggatgggcttacttcaagaaacttgatattctaatggaccgaaactttctgttaatggtcaaagatgtgattatagggaggatgcaaacggtgctatccatggtatgtagaatagacaacctgttctcagagcaagacatcttctcccttctaaatatctacagaattggagataaaattgtggagaggcagggaaatttttcttatgacttgattaaaatggtggaaccgatatgcaacttgaagctgatgaaattagcaagagaatcaaggcctttagtcccacaattccctcattttgaaaatcatatcaagacttctgttgatgaaggggcaaaaattgaccgaggtataagattcctccatgatcagataatgagtgtgaaaacagtggatctcacactggtgatttatggatcgttcagacattggggtcatccttttatagattattacactggactagaaaaattacattcccaagtaaccatgaagaaagatattgatgtgtcatatgcaaaagcacttgcaagtgatttagctcggattgttctatttcaacagttcaatgatcataaaaagtggttcgtgaatggagacttgctccctcatgatcatccctttaaaagtcatgttaaagaaaatacatggcccacagctgctcaagttcaagattttggagataaatggcatgaacttccgctgattaaatgttttgaaatacccgacttactagacccatcgataatatactctgacaaaagtcattcaatgaataggtcagaggtgttgaaacatgtccgaatgaatccgaacactcctatccctagtaaaaaggtgttgcagactatgttggacacaaaggctaccaattggaaagaatttcttaaagagattgatgagaagggcttagatgatgatgatctaattattggtcttaaaggaaaggagagggaactgaagttggcaggtagatttttctccctaatgtcttggaaattgcgagaatactttgtaattaccgaatatttgataaagactcatttcgtccctatgtttaaaggcctgacaatggcggacgatctaactgcagtcattaaaaagatgttagattcctcatccggccaaggattgaagtcatatgaggcaatttgcatagccaatcacattgattacgaaaaatggaataaccaccaaaggaagttatcaaacggcccagtgttccgagttatgggccagttcttaggttatccatccttaatcgagagaactcatgaattttttgagaaaagtcttatatactacaatggaagaccagacttgatgcgtgttcacaacaacacactgatcaattcaacctcccaacgagtttgttggcaaggacaagagggtggactggaaggtctacggcaaaaaggatggagtatcctcaatctactggttattcaaagagaggctaaaatcagaaacactgctgtcaaagtcttggcacaaggtgataatcaagttatttgcacacagtataaaacgaagaaatcgagaaacgttgtagaattacagggtgctctcaatcaaatggtttctaataatgagaaaattatgactgcaatcaaaatagggacagggaagttaggacttttgataaatgacgatgagactatgcaatctgcagattacttgaattatggaaaaataccgattttccgtggagtgattagagggttagagaccaagagatggtcacgagtgacttgtgtcaccaatgaccaaatacccacttgtgctaatataatgagctcagtttccacaaatgctctcaccgtagctcattttgctgagaacccaatcaatgccatgatacagtacaattattttgggacatttgctagactcttgttgatgatgcatgatcctgctcttcgtcaatcattgtatgaagttcaagataagataccaggcttgcacagttctactttcaaatacgccatgttgtatttggacccttccattggaggagtgtcgggcatgtctttgtccaggtttttgattagagccttcccagatcccgtaacagaaagtctctcattctggagattcatccatgtacatgctcgaagtgagcatctgaaggagatgagtgcagtatttggaaaccccgagatagccaagtttcgaataactcacatagacaagctagtagaagatccaacctctctgaacatcgctatgggaatgagtccagcgaacttgttaaagactgaggttaaaaaatgcttaatcgaatcaagacaaaccatcaggaaccaggtgattaaggatgcaaccatatatttgtatcatgaagaggatcggctcagaagtttcttatggtcaataaatcctctgttccctagatttttaagtgaattcaaatcaggcacttttttgggagtcgcagacgggctcatcagtctatttcaaaattctcgtactattcggaactcctttaagaaaaagtatcatagggaattggatgatttgattgtgaggagtgaggtatcctctttgacacatttagggaaacttcatttgagaaggggatcatgtaaaatgtggacatgttcagctactcatgctgacacattaagatacaaatcctggggccgtacagttattgggacaactgtaccccatccattagaaatgttgggtccacaacatcgaaaagagactccttgtgcaccatgtaacacatcagggttcaattatgtttctgtgcattgtccagacgggatccatgacgtctttagttcacggggaccattgcctgcttatctagggtctaaaacatctgaatctacatctattttgcagccttgggaaagggaaagcaaagtcccactgattaaaagagctacacgtcttagagatgctatctcttggtttgttgaacccgactctaaactagcaatgactatactttctaacatccactctttaacaggcgaagaatggaccaaaaggcagcatgggttcaaaagaacagggtctgcccttcataggttttcgacatctcggatgagccatggtgggttcgcatctcagagcactgcagcattgaccaggttgatggcaactacagacaccatgagggatctgggagatcagaatttcgactttttattccaagcaacgttgctctatgctcaaattaccaccactgttgcaagagacggatggatcaccagttgtacagatcattatcatattgcctgtaagtcctgtttgagacccatagaagagatcaccctggactcaagtatggactacacgcccccagatgtatcccatgtgctgaagacatggaggaatggggaaggttcgtggggacaagagataaaacagatctatcctttagaagggaattggaagaatttagcacctgctgagcaatcctatcaagtcggcagatgtataggttttctatatggagacttggcgtatagaaaatctactcatgccgaggacagttctctatttcctctatctatacaaggtcgtattagaggtcgaggtttcttaaaagggttgctagacggattaatgagagcaagttgctgccaagtaatacaccggagaagtctggctcatttgaagaggccggccaacgcagtgtacggaggtttgatttacttgattgataaattgagtgtatcacctccattcctttctcttactagatcaggacctattagagacgaattagaaacgattccccacaagatcccaacctcctatccgacaagcaaccgtgatatgggggtgattgtcagaaattacttcaaataccaatgccgtctaattgaaaagggaaaatacagatcacattattcacaattatggttattctcagatgtcttatccatagacttcattggaccattctctatttccaccaccctcttgcaaatcctatacaagccatttttatctgggaaagataagaatgagttgagagagctggcaaatctttcttcattgctaagatcaggagaggggtgggaagacatacatgtgaaattcttcaccaaggacatattattgtgtccagaggaaatcagacatgcttgcaagttcgggattgctaaggataataataaagacatgagctatcccccttggggaagggaatccagagggacaattacaacaatccctgtttattatacgaccaccccttacccaaagatgctagagatgcctccaagaatccaaaatcccctgctgtccggaatcaggttgggccaattaccaactggcgctcattataaaattcggagtatattacatggaatgggaatccattacagggacttcttgagttgtggagacggctccggagggatgactgctgcattactacgagaaaatgtgcatagcagaggaatattcaatagtctgttagaattatcagggtcagtcatgcgaggcgcctctcctgagccccccagtgccctagaaactttaggaggagataaatcgagatgtgtaaatggtgaaacatgttgggaatatccatctgacttatgtgacccaaggacttgggactatttcctccgactcaaagcaggcttggggcttcaaattgatttaattgtaatggatatggaagttcgggattcttctactagcctgaaaattgagacgaatgttagaaattatgtgcaccggattttggatgagcaaggagttttaatctacaagacttatggaacatatatttgtgagagcgaaaagaatgcagtaacaatccttggtcccatgttcaagacggtcgacttagttcaaacagaatttagtagttctcaaacgtctgaagtatatatggtatgtaaaggtttgaagaaattaatcgatgaacccaatcccgattggtcttccatcaatgaatcctggaaaaacctgtacgcattccagtcatcagaacaggaatttgccagagcaaagaaggttagtacatactttaccttgacaggtattccctcccaattcattcctgatccttttgtaaacattgagactatgctacaaatattcggagtacccacgggtgtgtctcatgcggctgccttaaaatcatctgatagacctgcagatttattgaccattagccttttttatatggcgattatatcgtattataacatcaatcatatcagagtaggaccgatacctccgaaccccccatcagatggaattgcacaaaatgtggggatcgctataactggtataagcttttggctgagtttgatggagaaagacattccactatatcaacagtgtttagcagttatccagcaatcattcccgattaggtgggaggctgtttcagtaaaaggaggatacaagcagaagtggagtactagaggtgatgggctcccaaaagatacccgaatttcagactccttggccccaatcgggaactggatcagatctctggaattggtccgaaaccaagttcgtctaaatccattcaatgagatcttgttcaatcagctatgtcgtacagtggataatcatttgaaatggtcaaatttgcgaagaaacacaggaatgattgaatggatcaatagacgaatttcaaaagaagaccggtctatactgatgttgaagagtgacctacacgaggaaaactcttggagagattaaaaaatcatgaggagactccaaactttaagtatgaaaaaaactttgatccttaagaccctcttgtggtttttattttttatctggttttgtggtcttcgt

SEQ ID NO: 160 - DNA, 9606 bp, Artificial Sequence
  Synthetic: Nucleotide sequence for Vector A, which is a VSV vector without the VSV-G gene.
acgaagacaaacaaaccattattatcattaaaaggctcaggagaaactttaacagtaatcaaaatgtctgttacagtcaagagaatcattgacaacacagtcgtagttccaaaacttcctgcaaatgaggatccagtggaatacccggcagattacttcagaaaatcaaaggagattcctctttacatcaatactacaaaaagtttgtcagatctaagaggatatgtctaccaaggcctcaaatccggaaatgtatcaatcatacatgtcaacagctacttgtatggagcattaaaggacatccggggtaagttggataaagattggtcaagtttcggaataaacatcgggaaagcaggggatacaatcggaatatttgaccttgtatccttgaaagccctggacggcgtacttccagatggagtatcggatgcttccagaaccagcgcagatgacaaatggttgcctttgtatctacttggcttatacagagtgggcagaacacaaatgcctgaatacagaaaaaagctcatggatgggctgacaaatcaatgcaaaatgatcaatgaacagtttgaacctcttgtgccagaaggtcgtgacatttttgatgtgtggggaaatgacagtaattacacaaaaattgtcgctgcagtggacatgttcttccacatgttcaaaaaacatgaatgtgcctcgttcagatacggaactattgtttccagattcaaagattgtgctgcattggcaacatttggacacctctgcaaaataaccggaatgtctacagaagatgtaacgacctggatcttgaaccgagaagttgcagatgaaatggtccaaatgatgcttccaggccaagaaattgacaaggccgattcatacatgccttatttgatcgactttggattgtcttctaagtctccatattcttccgtcaaaaaccctgccttccacttctgggggcaattgacagctcttctgctcagatccaccagagcaaggaatgcccgacagcctgatgacattgagtatacatctcttactacagcaggtttgttgtacgcttatgcagtaggatcctctgccgacttggcacaacagttttgtgttggagataacaaatacactccagatgatagtaccggaggattgacgactaatgcaccgccacaaggcagagatgtggtcgaatggctcggatggtttgaagatcaaaacagaaaaccgactcctgatatgatgcagtatgcgaaaagagcagtcatgtcactgcaaggcctaagagagaagacaattggcaagtatgctaagtcagaatttgacaaatgaccctataattctcagatcacctattatatattatgctacatatgaaaaaaactaacagatatcatggataatctcacaaaagttcgtgagtatctcaagtcctattctcgtctggatcaggcggtaggagagatagatgagatcgaagcacaacgagctgaaaagtccaattatgagttgttccaagaggatggagtggaagagcatactaagccctcttattttcaggcagcagatgattctgacacagaatctgaaccagaaattgaagacaatcaaggcttgtatgcaccagatccagaagctgagcaagttgaaggctttatacaggggcctttagatgactatgcagatgaggaagtggatgttgtatttacttcggactggaaacagcctgagcttgaatctgacgagcatggaaagaccttacggttgacatcgccagagggtttaagtggagagcagaaatcccagtggctttcgacgattaaagcagtcgtgcaaagtgccaaatactggaatctggcagagtgcacatttgaagcatcgggagaaggggtcattatgaaggagcgccagataactccggatgtatataaggtcactccagtgatgaacacacatccgtcccaatcagaagcagtatcagatgtttggtctctctcaaagacatccatgactttccaacccaagaaagcaagtcttcagcctctcaccatatccttggatgaattgttctcatctagaggagagttcatctctgtcggaggtgacggacgaatgtctcataaagaggccatcctgctcggcctgagatacaaaaagttgtacaatcaggcgagagtcaaatattctctgtagactatgaaaaaaagtaacagatatcacgatctaagtgttatcccaatccattcatcatgagttccttaaagaagattctcggtctgaaggggaaaggtaagaaatctaagaaattagggatcgcaccacccccttatgaagaggacactagcatggagtatgctccgagcgctccaattgacaaatcctattttggagttgacgagatggacacctatgatccgaatcaattaagatatgagaaattcttctttacagtgaaaatgacggttagatctaatcgtccgttcagaacatactcagatgtggcagccgctgtatcccattgggatcacatgtacatcggaatggcagggaaacgtcccttctacaaaatcttggcttttttgggttcttctaatctaaaggccactccagcggtattggcagatcaaggtcaaccagagtatcacgctcactgcgaaggcagggcttatttgccacataggatggggaagacccctcccatgctcaatgtaccagagcacttcagaagaccattcaatataggtctttacaagggaacgattgagctcacaatgaccatctacgatgatgagtcactggaagcagctcctatgatctgggatcatttcaattcttccaaattttctgatttcagagagaaggccttaatgtttggcctgattgtcgagaaaaaggcatctggagcgtgggtcctggactctatcggccacttcaaatgagctagtctaacttctagcttctgaacaatccccggtttactcagtctcccctaattccagcctctcgaacaactaatatcctgtcttttctatccctatgaaaaaaactaacagagatcgatctgtttacgcgctagtggatcctactcgaggctagctgtttacgcgttatccatgctcaaagaggcctcaattatatttgagtttttaatttttatgaaaaaaactaacagcaatcatggaagtccacgattttgagaccgacgagttcaatgatttcaatgaagatgactatgccacaagagaattcctgaatcccgatgagcgcatgacgtacttgaatcatgctgattacaacctgaattctcctctaattagtgatgatattgacaatttaatcaggaaattcaattctcttccaattccctcgatgtgggatagtaagaactgggatggagttcttgagatgttaacgtcatgtcaagccaatcccatcccaacatctcagatgcataaatggatgggaagttggttaatgtctgataatcatgatgccagtcaagggtatagttttttacatgaagtggacaaagaggcagaaataacatttgacgtggtggagaccttcatccgcggctggggcaacaaaccaattgaatacatcaaaaaggaaagatggactgactcattcaaaattctcgcttatttgtgtcaaaagtttttggacttacacaagttgacattaatcttaaatgctgtctctgaggtggaattgctcaacttggcgaggactttcaaaggcaaagtcagaagaagttctcatggaacgaacatatgcaggattagggttcccagcttgggtcctacttttatttcagaaggatgggcttacttcaagaaacttgatattctaatggaccgaaactttctgttaatggtcaaagatgtgattatagggaggatgcaaacggtgctatccatggtatgtagaatagacaacctgttctcagagcaagacatcttctcccttctaaatatctacagaattggagataaaattgtggagaggcagggaaatttttcttatgacttgattaaaatggtggaaccgatatgcaacttgaagctgatgaaattagcaagagaatcaaggcctttagtcccacaattccctcattttgaaaatcatatcaagacttctgttgatgaaggggcaaaaattgaccgaggtataagattcctccatgatcagataatgagtgtgaaaacagtggatctcacactggtgatttatggatcgttcagacattggggtcatccttttatagattattacactggactagaaaaattacattcccaagtaaccatgaagaaagatattgatgtgtcatatgcaaaagcacttgcaagtgatttagctcggattgttctatttcaacagttcaatgatcataaaaagtggttcgtgaatggagacttgctccctcatgatcatccctttaaaagtcatgttaaagaaaatacatggcccacagctgctcaagttcaagattttggagataaatggcatgaacttccgctgattaaatgttttgaaatacccgacttactagacccatcgataatatactctgacaaaagtcattcaatgaataggtcagaggtgttgaaacatgtccgaatgaatccgaacactcctatccctagtaaaaaggtgttgcagactatgttggacacaaaggctaccaattggaaagaatttcttaaagagattgatgagaagggcttagatgatgatgatctaattattggtcttaaaggaaaggagagggaactgaagttggcaggtagatttttctccctaatgtcttggaaattgcgagaatactttgtaattaccgaatatttgataaagactcatttcgtccctatgtttaaaggcctgacaatggcggacgatctaactgcagtcattaaaaagatgttagattcctcatccggccaaggattgaagtcatatgaggcaatttgcatagccaatcacattgattacgaaaaatggaataaccaccaaaggaagttatcaaacggcccagtgttccgagttatgggccagttcttaggttatccatccttaatcgagagaactcatgaattttttgagaaaagtcttatatactacaatggaagaccagacttgatgcgtgttcacaacaacacactgatcaattcaacctcccaacgagtttgttggcaaggacaagagggtggactggaaggtctacggcaaaaaggatggagtatcctcaatctactggttattcaaagagaggctaaaatcagaaacactgctgtcaaagtcttggcacaaggtgataatcaagttatttgcacacagtataaaacgaagaaatcgagaaacgttgtagaattacagggtgctctcaatcaaatggtttctaataatgagaaaattatgactgcaatcaaaatagggacagggaagttaggacttttgataaatgacgatgagactatgcaatctgcagattacttgaattatggaaaaataccgattttccgtggagtgattagagggttagagaccaagagatggtcacgagtgacttgtgtcaccaatgaccaaatacccacttgtgctaatataatgagctcagtttccacaaatgctctcaccgtagctcattttgctgagaacccaatcaatgccatgatacagtacaattattttgggacatttgctagactcttgttgatgatgcatgatcctgctcttcgtcaatcattgtatgaagttcaagataagataccaggcttgcacagttctactttcaaatacgccatgttgtatttggacccttccattggaggagtgtcgggcatgtctttgtccaggtttttgattagagccttcccagatcccgtaacagaaagtctctcattctggagattcatccatgtacatgctcgaagtgagcatctgaaggagatgagtgcagtatttggaaaccccgagatagccaagtttcgaataactcacatagacaagctagtagaagatccaacctctctgaacatcgctatgggaatgagtccagcgaacttgttaaagactgaggttaaaaaatgcttaatcgaatcaagacaaaccatcaggaaccaggtgattaaggatgcaaccatatatttgtatcatgaagaggatcggctcagaagtttcttatggtcaataaatcctctgttccctagatttttaagtgaattcaaatcaggcacttttttgggagtcgcagacgggctcatcagtctatttcaaaattctcgtactattcggaactcctttaagaaaaagtatcatagggaattggatgatttgattgtgaggagtgaggtatcctctttgacacatttagggaaacttcatttgagaaggggatcatgtaaaatgtggacatgttcagctactcatgctgacacattaagatacaaatcctggggccgtacagttattgggacaactgtaccccatccattagaaatgttgggtccacaacatcgaaaagagactccttgtgcaccatgtaacacatcagggttcaattatgtttctgtgcattgtccagacgggatccatgacgtctttagttcacggggaccattgcctgcttatctagggtctaaaacatctgaatctacatctattttgcagccttgggaaagggaaagcaaagtcccactgattaaaagagctacacgtcttagagatgctatctcttggtttgttgaacccgactctaaactagcaatgactatactttctaacatccactctttaacaggcgaagaatggaccaaaaggcagcatgggttcaaaagaacagggtctgcccttcataggttttcgacatctcggatgagccatggtgggttcgcatctcagagcactgcagcattgaccaggttgatggcaactacagacaccatgagggatctgggagatcagaatttcgactttttattccaagcaacgttgctctatgctcaaattaccaccactgttgcaagagacggatggatcaccagttgtacagatcattatcatattgcctgtaagtcctgtttgagacccatagaagagatcaccctggactcaagtatggactacacgcccccagatgtatcccatgtgctgaagacatggaggaatggggaaggttcgtggggacaagagataaaacagatctatcctttagaagggaattggaagaatttagcacctgctgagcaatcctatcaagtcggcagatgtataggttttctatatggagacttggcgtatagaaaatctactcatgccgaggacagttctctatttcctctatctatacaaggtcgtattagaggtcgaggtttcttaaaagggttgctagacggattaatgagagcaagttgctgccaagtaatacaccggagaagtctggctcatttgaagaggccggccaacgcagtgtacggaggtttgatttacttgattgataaattgagtgtatcacctccattcctttctcttactagatcaggacctattagagacgaattagaaacgattccccacaagatcccaacctcctatccgacaagcaaccgtgatatgggggtgattgtcagaaattacttcaaataccaatgccgtctaattgaaaagggaaaatacagatcacattattcacaattatggttattctcagatgtcttatccatagacttcattggaccattctctatttccaccaccctcttgcaaatcctatacaagccatttttatctgggaaagataagaatgagttgagagagctggcaaatctttcttcattgctaagatcaggagaggggtgggaagacatacatgtgaaattcttcaccaaggacatattattgtgtccagaggaaatcagacatgcttgcaagttcgggattgctaaggataataataaagacatgagctatcccccttggggaagggaatccagagggacaattacaacaatccctgtttattatacgaccaccccttacccaaagatgctagagatgcctccaagaatccaaaatcccctgctgtccggaatcaggttgggccaattaccaactggcgctcattataaaattcggagtatattacatggaatgggaatccattacagggacttcttgagttgtggagacggctccggagggatgactgctgcattactacgagaaaatgtgcatagcagaggaatattcaatagtctgttagaattatcagggtcagtcatgcgaggcgcctctcctgagccccccagtgccctagaaactttaggaggagataaatcgagatgtgtaaatggtgaaacatgttgggaatatccatctgacttatgtgacccaaggacttgggactatttcctccgactcaaagcaggcttggggcttcaaattgatttaattgtaatggatatggaagttcgggattcttctactagcctgaaaattgagacgaatgttagaaattatgtgcaccggattttggatgagcaaggagttttaatctacaagacttatggaacatatatttgtgagagcgaaaagaatgcagtaacaatccttggtcccatgttcaagacggtcgacttagttcaaacagaatttagtagttctcaaacgtctgaagtatatatggtatgtaaaggtttgaagaaattaatcgatgaacccaatcccgattggtcttccatcaatgaatcctggaaaaacctgtacgcattccagtcatcagaacaggaatttgccagagcaaagaaggttagtacatactttaccttgacaggtattccctcccaattcattcctgatccttttgtaaacattgagactatgctacaaatattcggagtacccacgggtgtgtctcatgcggctgccttaaaatcatctgatagacctgcagatttattgaccattagccttttttatatggcgattatatcgtattataacatcaatcatatcagagtaggaccgatacctccgaaccccccatcagatggaattgcacaaaatgtggggatcgctataactggtataagcttttggctgagtttgatggagaaagacattccactatatcaacagtgtttagcagttatccagcaatcattcccgattaggtgggaggctgtttcagtaaaaggaggatacaagcagaagtggagtactagaggtgatgggctcccaaaagatacccgaatttcagactccttggccccaatcgggaactggatcagatctctggaattggtccgaaaccaagttcgtctaaatccattcaatgagatcttgttcaatcagctatgtcgtacagtggataatcatttgaaatggtcaaatttgcgaagaaacacaggaatgattgaatggatcaatagacgaatttcaaaagaagaccggtctatactgatgttgaagagtgacctacacgaggaaaactcttggagagattaaaaaatcatgaggagactccaaactttaagtatgaaaaaaactttgatccttaagaccctcttgtggtttttattttttatctggttttgtggtcttcgt

SEQ ID NO: 161 - DNA, 9490 bp, Artificial Sequence
  Synthetic: Nucleotide sequence for Vector B, which is a VSV vector without the VSV-G gene.
acgaagacaaacaaaccattattatcattaaaaggctcaggagaaactttaacagtaatcaaaatgtctgttacagtcaagagaatcattgacaacacagtcatagttccaaaacttcctgcaaatgaggatccagtggaatacccggcagattacttcagaaaatcaaaggagattcctctttacatcaatactacaaaaagtttgtcagatctaagaggatatgtctaccaaggcctcaaatccggaaatgtatcaatcatacatgtcaacagctacttgtatggagcattgaaggacatccggggtaagttggataaagattggtcaagtttcggaataaacatcgggaaggcaggggatacaatcggaatatttgaccttgtatccttgaaagccctggacggtgtacttccagatggagtatcggatgcttccagaaccagcgcagatgacaaatggttgcctttgtatctacttggcttatacagagtgggcagaacacaaatgcctgaatacagaaaaaggctcatggatgggctgacaaatcaatgcaaaatgatcaatgaacagtttgaacctcttgtgccagaaggtcgtgacatttttgatgtgtggggaaatgacagtaattacacaaaaattgtcgctgcagtggacatgttcttccacatgttcaaaaaacatgaatgtgcctcgttcagatacggaactattgtttccagattcaaagattgtgctgcattggcaacatttggacacctctgcaaaataaccggaatgtctacagaagatgtgacgacctggatcttgaaccgagaagttgcagatgagatggtccaaatgatgcttccaggccaagaaattgacaaggctgattcatacatgccttatttgatcgactttggattgtcttctaagtctccatattcttccgtcaaaaaccctgccttccacttctgggggcaattgacagctcttctgctcagatccaccagagcaaggaatgcccgacagcctgatgacattgagtatacatctcttactacagcaggtttgttgtacgcttatgcagtaggatcctctgctgacttggcacaacagttttgtgttggagatagcaaatacactccagatgatagtaccggaggattgacgactaatgcaccgccacaaggcagagatgtggtcgaatggctcggatggtttgaagatcaaaacagaaaaccgactcctgatatgatgcagtatgcgaaacgagcagtcatgtcactgcaaggcctaagagagaagacaattggcaagtatgctaagtcagagtttgacaaatgaccctataattctcagatcacctattatatattatgctagctatgaaaaaaactaacagatatcatggataatctcacaaaagttcgtgagtatctcaagtcctattctcgtctagatcaggcggtaggagagatagatgagatcgaagcacaacgagctgaaaagtccaattatgagttgttccaagaggacggagtggaagagcatactaggccctcttattttcaggcagcagatgattctgacacagaatctgaaccagaaattgaagacaatcaaggcttgtatgtaccagatccggaagctgagcaagttgaaggctttatacaggggcctttagatgactatgcagatgaggacgtggatgttgtattcacttcggactggaaacagcctgagcttgaatccgacgagcatggaaagaccttacggttgacattgccagagggtttaagtggagagcagaaatcccagtggcttttgacgattaaagcagtcgttcaaagtgccaaacactggaatctggcagagtgcacatttgaagcatcgggagaaggggtcatcataaaaaagcgccagataactccggatgtatataaggtcactccagtgatgaacacacatccgtcccaatcagaagccgtatcagatgtttggtctctctcaaagacatccatgactttccaacccaagaaagcaagtcttcagcctctcaccatatccttggatgaattgttctcatctagaggagaattcatctctgtcggaggtaacggacgaatgtctcataaagaggccatcctgctcggtctgaggtacaaaaagttgtacaatcaggcgagagtcaaatattctctgtagactagtatgaaaaaaagtaacagatatcacaatctaagtgttatcccaatccattcatcatgagttccttaaagaagattctcggtctgaaggggaaaggtaagaaatctaagaaattagggatcgcaccacccccttatgaagaggacactaacatggagtatgctccgagcgctccaattgacaaatcctattttggagttgacgagatggacactcatgatccgaatcaattaagatatgagaaattcttctttacagtgaaaatgacggttagatctaatcgtccgttcagaacatactcagatgtggcagccgctgtatcccattgggatcacatgtacatcggaatggcagggaaacgtcccttctacaagatcttggcttttttgggttcttctaatctaaaggccactccagcggtattggcagatcaaggtcaaccagagtatcatgctcactgtgaaggcagggcttatttgccacacagaatggggaagacccctcccatgctcaatgtaccagagcacttcagaagaccattcaatataggtctttacaagggaacgattgagctcacaatgaccatctacgatgatgagtcactggaagcagctcctatgatctgggatcatttcaattcttccaaattttctgatttcagagagaaggccttaatgtttggcctgattgtcgagaaaaaggcatctggagcttgggtcctggattctgtcagccacttcaaatgagctagtctagcttccagcttctgaacaatccccggtttactcagtctctcctaattccagcctttcgaattaattaaattttaatttttaatttttatgaaaaaaaactaacagcaatcatggaagtccacgattttgagaccgacgagttcaatgatttcaatgaagatgactatgccacaagagaattcctgaatcccgatgagcgcatgacgtacttgaatcatgctgattacaatttgaattctcctctaattagtgatgatattgacaatttgatcaggaaattcaattctcttccgattccctcgatgtgggatagtaagaactgggatggagttcttgagatgttaacatcatgtcaagccaatcccatctcaacatctcagatgcataaatggatgggaagttggttaatgtctgataatcatgatgccagacaagggtatagttttttacatgaagtggacaaagaggcagaaataacatttgacgtggtggagaccttcatccgcggctggggcaacaaaccaattgaatacatcaaaaaggaaagatggactgactcattcaaaattctcgcttatttgtgtcaaaagtttttggacttacacaagttgacattaatcttaaatgctgtctctgaggtggaattgctcaacttggcgaggactttcaaaggcaaagtcagaagaagttctcatggaacgaacatatgcaggcttagggttcccagcttgggtcctacttttatttcagaaggatgggcttacttcaagaaacttgatattctaatggaccgaaactttctgttaatggtcaaagatgtgattatagggaggatgcaaacggtgctatccatggtatgtagaatagacaacctgttctcagagcaagacatcttctcccttctaaatatctacagaattggagataaaattgtggagaggcagggaaatttttcttatgacttgattaaaatggtggaaccgatatgcaacttgaagctgatgaaattagcaagagaatcaaggcctttagtcccacaattccctcattttgaaaatcatatcaagacttctgttgatgaaggggcaaaaattgaccgaggtataagattcctccatgatcagataatgagtgtgaaaacagtggatctcacactggtgatttatggatcgttcagacattggggtcatccttttatagattattacgctggactagaaaaattacattcccaagtaaccatgaagaaagatattgatgtgtcatatgcaaaagcacttgcaagtgatttagctcggattgttctatttcaacagttcaatgatcataaaaagtggttcgtgaatggagacttgctccctcatgatcatccctttaaaagtcatgttaaagaaaatacatggcctacagctgctcaagttcaagattttggagataaatggcatgaacttccgctgattaaatgttttgaaatacccgacttactagacccatcgataatatactctgacaaaagtcattcaatgaataggtcagaggtgttgaaacatgtccgaatgaatccgaacactcctatccctagtaaaaaggtgttgcagactatgttggacacaaaggctaccaattggaaagaatttcttaaagagattgatgagaagggcttagatgatgatgatctaattattggtcttaaaggaaaggagagggaactgaagttggcaggtagatttttctccctaatgtcttggaaattgcgagaatactttgtaattaccgaatatttgataaagactcatttcgtccctatgtttaaaggcctgacaatggcggacgatctaactgcagtcattaaaaagatgttagattcctcatccggccaaggattgaagtcatatgaggcaatttgcatagccaatcacattgattacgaaaaatggaataaccaccaaaggaagttatcaaacggcccagtgttccgagttatgggccagttcttaggttatccatccttaatcgagagaactcatgaattttttgagaaaagtcttatatactacaatggaagaccagacttgatgcgtgttcacaacaacacactgatcaattcaacctcccaacgagtttgttggcaaggacaagagggtggactggaaggtctacggcaaaaaggatggagtatcctcaatctactggttattcaaagagaggctaaaatcagaaacactgctgtcaaagtcttggcacaaggtgataatcaagttatttgcacacagtataaaacgaagaaatcgagaaacgttgtagaattacagggtgctctcaatcaaatggtttctaataatgagaaaattatgactgcaatcaaaatagggacagggaagttaggacttttgataaatgacgatgagactatgcaatctgcagattacttgaattatggaaaaataccgattttccgtggagtgattagagggttagagaccaagagatggtcacgagtgacttgtgtcaccaatgaccaaatacccacttgtgctaatataatgagctcagtttccacaaatgctctcaccgtagctcattttgctgagaacccaatcaatgccatgatacagtacaattattttgggacatttgctagactcttgttgatgatgcatgatcctgctcttcgtcaatcattgtatgaagttcaagataagataccgggcttgcacagttctactttcaaatacgccatgttgtatttggacccttccattggaggagtgtcgggcatgtctttgtccaggtttttgattagagccttcccagatcccgtaacagaaagtctctcattctggagattcatccatgtacatgctcgaagtgagcatctgaaggagatgagtgcagtatttggaaaccccgagatagccaagttccgaataactcacatagacaagctagtagaagatccaacctctctgaacatcgctatgggaatgagtccagcgaacttgttaaagactgaggttaaaaaatgcttaatcgaatcaagacaaaccatcaggaaccaggtgattaaggatgcaaccatatatttgtatcatgaagaggatcggctcagaagtttcttatggtcaataaatcctctgttccctagatttttaagtgaattcaaatcaggcacttttttgggagtcgcagacgggctcatcagtctatttcaaaattctcgtactattcggaactcctttaagaaaaagtatcatagggaattggatgatttgattgtgaggagtgaggtatcctctttgacacatttagggaaacttcatttgagaaggggatcatgtaaaatgtggacatgttcagctactcatgctgacacattaagatacaaatcctggggccgtacagttattgggacaactgtaccccatccattagaaatgttgggtccacaacatcgaaaagagactccttgtgcaccatgtaacacatcagggttcaattatgtttctgtgcattgtccagacgggatccatgacgtctttagttcacggggaccattgcctgcttatctagggtctaaaacatctgaatctacatctattttgcagccttgggaaagggaaagcaaagtcccactgattaaaagagctacacgtcttagagatgctatctcttggtttgttgaacccgactctaaactagcaatgactatactttctaacatccactctttaacaggcgaagaatggaccgaaaggcagcatgggttcaaaagaacagggtctgcccttcataggttttcgacatctcggatgagccatggtgggttcgcatctcagagcactgcagcattgaccaggttgatggcaactacagacaccatgagggatctgggagatcagaatttcgactttttattccaagcaacgttgctctatgctcaaattaccaccactgttgcaagagacggatggatcaccagttgtacagatcattatcatattgcctgtaagtcctgtttgagacccatagaagagatcaccctggactcaagtatggactacacgcccccagatgtatcccatgtgctgaagacatggaggaatggggaaggttcgtggggacaagagataaaacagatctatcctttagaagggaattggaagaatttagcacctgctgagcaatcctatcaagtcggcagatgtataggttttctatatggagacttggcgtatagaaaatctactcatgccgaggacagttctctatttcctctatctatacaaggtcgtattagaggtcgaggtttcttaaaagggttgctagacggattaatgagagcaagttgctgccaagtaatacaccggagaagtctggctcatttgaagaggccggccaacgcagtgtacggaggtttgatttacttgattgataaattgagtgtatcacctccattcctttctcttactagatcaggacctattagagacgaattagaaacgattccccacaagatcccaacctcctatccgacaagcaaccgtgatatgggggtgattgtcagaaattacttcaaataccaatgccgtctaattgaaaagggaaaatacagatcacattattcacaattatggttattctcagatgtcttatccatagacttcattggaccattctctatttccaccaccctcttgcaaatcctatacaagccatttttatctgggaaagataagaatgagttgagagagctggcaaatctttcttcattgctaagatcaggagaggggtgggaagacatacatgtgaaattcttcaccaaggacatattattgtgtccagaggaaatcagacatgcttgcaagttcgggattgctaaggataataataaagacatgagctatcccccttggggaagggaatccagagggacaattacaacaatccctgtttattatacgaccaccccttacccaaagatgctagagatgcctccaagaatccaaaatcccctgctgtccggaatcaggttgggccaattaccaactggcgctcattataaaattcggagtatattacatggaatgggaatccattacagggacttcttgagttgtggagacggctccggagggatgactgctgcattactacgagaaaatgtgcatagcagaggaatattcaatagtctgttagaattatcagggtcagtcatgcgaggcgcctctcctgagccccccagtgccctagaaactttaggaggagataaatcgagatgtgtaaatggtgaaacatgttgggaatatccatctgacttatgtgacccaaggacttgggactatttcctccgactcaaagcaggcttggggcttcaaattgatttaattgtaatggatatggaagttcgggattcttctactagcctgaaaattgagacgaatgttagaaattatgtgcaccggattttggatgagcaaggagttttaatctacaagacttatggaacatatatttgtgagagcgaaaagaatgcagtaacaatccttggtcccatgttcaagacggtcgacttagttcaaacagaatttagtagttctcaaacgtctgaagtatatatggtatgtaaaggtttgaagaaattaatcgatgaacccaatcccgattggtcttccatcaatgaatcctggaaaaacctgtacgcattccagtcatcagaacaggaatttgccagagcaaagaaggttagtacatactttaccttgacaggtattccctcccaattcattcctgatccttttgtaaacattgagactatgctacaaatattcggagtacccacgggtgtgtctcatgcggctgccttaaaatcatctgatagacctgcagatttattgaccattagccttttttatatggcgattatatcgtattataacatcaatcatatcagagtaggaccgatacctccgaaccccccatcagatggaattgcacaaaatgtggggatcgctataactggtataagcttttggctgagtttgatggagaaagacattccactatatcaacagtgtttagcagttatccagcaatcattcccgattaggtgggaggctgtttcagtaaaaggaggatacaagcagaagtggagtactagaggtgatgggctcccaaaagatacccgaatttcagactccttggccccaatcgggaactggatcagatctctggaattggtccgaaaccaagttcgtctaaatccattcaatgagatcttgttcaatcagctatgtcgtacagtggataatcatttgaaatggtcaaatttgcgaaaaaacacaggaatgattgaatggatcaatagacgaatttcaaaagaagaccggtctatactgatgttgaagagtgacctacacgaggaaaactcttggagagattaaaaaatcatgaggagactccaaactttaagtatgaaaaaaactttgatccttaagaccctcttgtggtttttattttttatctggttttgtggtcttcgt

SEQ ID NO: 162 - protein, 15 aa, Artificial Sequence
  Synthetic: Amino acid sequence of the signal sequence (SS) of SEQ ID NOS: 1, 4, 7, 10, 13, 16, 19, and 22
MFVFLVLLPLVSSQC

SEQ ID NO: 163 - protein, 12 aa, Artificial Sequence
  Synthetic: Amino acid sequence of the membrane-proximal external region (MPER) of SEQ ID NOS: 1, 4, 7, 10, and 16
YEQYIKWPWYIW

SEQ ID NO: 164 - protein, 17 aa, Artificial Sequence
  Synthetic: Amino acid sequence of the transmembrane region (TM) of SEQ ID NOS: 1, 4, 7, and 16
LGFIAGLIAIVMVTIML

SEQ ID NO: 165 - protein, 39 aa, Artificial Sequence
  Synthetic: Amino acid sequence of the cytoplasmic tail (CT) of SEQ ID NO: 1
CCMTSCCSCLKGCCSCGSCCKFDEDDSEPVLKGVKLHYT

SEQ ID NO: 166 - DNA, 10 bp, Artificial Sequence
  Synthetic: Kozak sequence of SEQ ID NOS: 2, 3, 5, 6, 8, 9, 11, 12, 14, 15, 17, 18, 20, 21, 23, and 24
aggagccacc

SEQ ID NO: 167 - DNA, 45 bp, Artificial Sequence
  Synthetic: Nucleotide sequence encoding the SS of SEQ ID NOS: 2, 3, 5, 6, 8, 9, 11, 12, 14, 15, 17, 18, 20, 21, 23, and 24
atgttcgtgttcctggtgctattacctctggtttcgtctcaatgc

SEQ ID NO: 168 - DNA, 36 bp, Artificial Sequence
  Synthetic: Nucleotide sequence encoding the MPER of SEQ ID NOS: 2, 3, 5, 6, 8, 9, 11, 12, 17, and 18
tacgaacaatacataaaatggccatggtacatttgg

SEQ ID NO: 169 - DNA, 51 bp, Artificial Sequence
  Synthetic: Nucleotide sequence encoding the TM of SEQ ID NOS: 2, 3, 5, 6, 8, 9, 17, and 18
ctcgggtttattgctggactaattgcaatagtcatggtcactatcatgctg

SEQ ID NO: 170 - DNA, 117 bp, Artificial Sequence
  Synthetic: Nucleotide sequence encoding the CT of SEQ ID NOS: 2 and 3
tgttgtatgacatcgtgctgctcatgcctcaagggatgttgtagctgtggatcttgttgcaagttcgatgaggatgattcagaaccagttttaaaaggagtaaagttgcattacaca

SEQ ID NO: 171 - protein, 8 aa, Artificial Sequence
  Synthetic: Amino acid sequence of the CT of SEQ ID NO: 4
CCMTSCCS

SEQ ID NO: 172 - DNA, 24 bp, Artificial Sequence
  Synthetic: Nucleotide sequence encoding the CT of SEQ ID NOS: 5 and 6
tgttgtatgacatcgtgctgctca

SEQ ID NO: 173 - protein, 29 aa, Artificial Sequence
  Synthetic: Amino acid sequence of the Vector B VSV-G-CT IND serotype of SEQ ID NOS: 7, 10, 13, and 19
RVGIYLCIKLKHTKKRQIYTDIEMNRLGK

SEQ ID NO: 174 - DNA, 87 bp, Artificial Sequence
  Synthetic: Nucleotide sequence encoding the Vector B VSV-G-CT IND serotype sequence of SEQ ID NOS: 8, 9, 11, 12, 14, 15, 20, and 21
cgagttggtatttatctttgcattaaattaaagcacaccaagaaaagacagatttatacagacatagagatgaaccgacttggaaag

SEQ ID NO: 175 - protein, 20 aa, Artificial Sequence
  Synthetic: Amino acid sequence of the Vector B VSV-G-TM IND serotype of SEQ ID NOS: 10 and 13
SSIASFFFIIGLIIGLFLVL

SEQ ID NO: 176 - DNA, 60 bp, Artificial Sequence
  Synthetic: Nucleotide sequence encoding the Vector B VSV-G-TM IND serotype sequence of SEQ ID NOS: 11, 12, 14, and 15
agctctattgcctcttttttctttatcatagggttaatcattggactattcttggttctc

SEQ ID NO: 177 - protein, 6 aa, Artificial Sequence
  Synthetic: Amino acid sequence of the MPER of SEQ ID NOS: 13, 19, and 22
YEQYIK

SEQ ID NO: 178 - DNA, 18 bp, Artificial Sequence
  Synthetic: Nucleotide sequence encoding the MPER of SEQ ID NOS: 14 and 15
tacgaacaatacataaaa

SEQ ID NO: 179 - protein, 18 aa, Artificial Sequence
  Synthetic: Amino acid sequence of the CT of SEQ ID NO: 16
CCMTSCCSCLKGCCSCGS

SEQ ID NO: 180 - DNA, 54 bp, Artificial Sequence
  Synthetic: Nucleotide sequence encoding the CT of SEQ ID NOS: 17 and 18
tgttgtatgacatcgtgctgctcatgcctcaagggatgttgtagctgtggatct

SEQ ID NO: 181 - protein, 23 aa, Artificial Sequence
  Synthetic: Amino acid sequence of the TM of SEQ ID NOS: 19 and 22
WPWYIWLGFIAGLIAIVMVTIML

SEQ ID NO: 182 - protein, 20 aa, Artificial Sequence
  Synthetic: Amino acid sequence of the CT of SEQ ID NOS: 19 and 22
CCMTSCCSCLKGCCSCGSCC

SEQ ID NO: 183 - DNA, 69 bp, Artificial Sequence
  Synthetic: Nucleotide sequence encoding the TM of SEQ ID NOS: 20, 21, 23, and 24
tggccatggtacatttggctcgggtttattgctggactaattgcaatagtcatggtcactatcatgctg

SEQ ID NO: 184 - DNA, 60 bp, Artificial Sequence
  Synthetic: Nucleotide sequence encoding the CT of SEQ ID NOS: 20, 21, 23, and 24
tgttgtatgacatcgtgctgctcatgcctcaagggatgttgtagctgtggatcttgttgc

SEQ ID NO: 185 - protein, 21 aa, Artificial Sequence
  Synthetic: Amino acid sequence for the Vector B VSV-G-CT IND serotype of SEQ ID NO: 22
KLKHTKKRQIYTDIEMNRLGK

SEQ ID NO: 186 - DNA, 63 bp, Artificial Sequence
  Synthetic: Nucleotide sequence encoding the Vector B VSV-G-CT IND serotype sequence of SEQ ID NO: 23 and 24
aaattaaagcacaccaagaaaagacagatttatacagacatagagatgaaccgacttggaaag

SEQ ID NO: 187 - protein, 49 aa, Artificial Sequence
  Synthetic: VSV-G-TM-CT segment of Vector A
SSIASFFFIIGLIIGLFLVLRVGIHLCIKLKHTKKRQIYTDIEMNRLGK

SEQ ID NO: 188 - protein, 49 aa, Artificial Sequence
  Synthetic: VSV-G-TM-CT segment of Vector B
SSIASFFFIIGLIIGLFLVLRVGIYLCIKLKHTKKRQIYTDIEMNRLGK

SEQ ID NO: 189 - protein, 19 aa, Artificial Sequence
  Synthetic: Leader sequence 1
NEVAKNLNESLIDLGELGK

SEQ ID NO: 190 - protein, 25 aa, Artificial Sequence
  Synthetic: Leader sequence 2
TLFFGDTGLSKNPIEFVEGWFSSWK

SEQ ID NO: 191 - protein, 74 aa, Artificial Sequence
  Synthetic: A segment of VSV-G
TLFFGDTGLSKNPIEFVEGWFSSWKSSIASFFFTIGLIIGLFLVLRVGIYLCIKLKHTKKRQIYTDIEMNRLGK

SEQ ID NO: 192 - DNA, 18 bp, Artificial Sequence
  Synthetic: Nucleotide sequence encoding the MPER of SEQ ID NOS: 20 and 23
tacgaacaatacataaaa

1. A recombinant VSV vector comprising:
a. at least a portion of a VSV genome comprising at least a VSV-N gene, VSV-P gene, VSV-M gene, and VSV-L gene, and
b. a nucleic acid sequence encoding a SARS-CoV-2 S protein or an immunogenic variant thereof.

2. A recombinant VSV particle comprising the vector of claim 1 and displaying the S protein or immunogenic variant thereof on the surface of the VSV particle.

3. A recombinant VSV particle comprising:
a. at least a portion of a VSV genome comprising N, P, M, and L genes and
b. a nucleic acid sequence encoding a SARS-CoV-2 S protein or an immunogenic variant thereof.

4. The recombinant VSV particle of claim 2, wherein the VSV particle is replicable.

5. The recombinant VSV particle of claim 3, wherein the VSV particle displays the S protein or an immunogenic variant thereof on the surface of the VSV particle.

6. An immunogenic recombinant protein comprising a SARS-CoV-2 S protein or an immunogenic variant thereof expressed by the recombinant VSV vector of claim 1.

7. An immunogenic recombinant protein comprising a SARS-CoV-2 S protein or an immunogenic variant thereof and at least a fragment of a VSV glycoprotein (G).

8. A SARS-CoV-2 vaccine comprising the recombinant VSV vector of claim 1.

9. The recombinant VSV vector of claim 1, wherein the SARS-CoV-2 S protein or an immunogenic variant thereof comprises an amino acid sequence having a length of at least 1223, 1228, 1233, 1238, 1243, 1248, 1249, 1250, 1251, 1252, 1253, 1254, 1255, 1256, 1257, 1258, 1259, 1260, 1261, 1262, 1263, 1264, 1265, 1266, 1267, 1268, 1269, 1270, 1271, 1272, 1273, 1274, 1275, 1276, 1277 or 1278 amino acids and having homology over its own length of at least 90, 91, 92, 93, 94, 95, 96, 97, 98, or 99% homology to any one of SEQ ID NOS: 1, 4, 7, 10, 13, 16, 19, 22, 25-67, 153, or 158.

10. The recombinant VSV vector of claim 1, wherein the immunogenic variant of the SARS-CoV-2 S protein comprises a fragment of the SARS-CoV-2 S protein having a deletion of 9, 13, 19, 21 or 23 amino acids at the C-terminal end of the SARS-CoV-2 S protein.

11. The recombinant VSV vector of claim 1, wherein:
a. the recombinant VSV vector is rVSVΔG-SARS-CoV-2 clone MB2 (SEQ ID NO: 154); or
b. the recombinant VSV vector, recombinant VSV particle, or SARS-CoV-2 vaccine comprises nucleic acids encoding
i. VSV L protein (SEQ ID NO: 152);
ii. VSV N protein (SEQ ID NO: 155);
iii. VSV P protein (SEQ ID NO: 156);
iv. VSV M protein (SEQ ID NO: 157); and
v. SARS-CoV-2 S protein (SEQ ID NO: 158).

12. The recombinant VSV particle of claim 2, wherein the particle or vaccine comprises VSV and SARS-CoV-2 proteins from MB2 comprising:
a. VSV L protein (SEQ ID NO: 152);
b. VSV N protein (SEQ ID NO: 155);
c. VSV P protein (SEQ ID NO: 156);
d. VSV M protein (SEQ ID NO: 157); and
e. SARS-CoV-2 S protein (SEQ ID NO: 158).

13. The recombinant VSV vector of claim 1, wherein:
a. the recombinant VSV vector is rVSVΔG-SARS-CoV-2 clone MB1 (SEQ ID NO: 150); or
b. the recombinant VSV vector, recombinant VSV particle, or SARS-CoV-2 vaccine comprises nucleic acids encoding
i. VSV L protein (SEQ ID NO: 152);
ii. VSV N protein (SEQ ID NO: 155);
iii. VSV P protein (SEQ ID NO: 156);
iv. VSV M protein (SEQ ID NO: 153); and
v. SARS-CoV-2 S protein (SEQ ID NO: 151).

14. The recombinant VSV particle of claim 2, wherein the particle or vaccine comprises VSV and SARS-CoV-2 proteins from MB1 comprising:
a. VSV L protein (SEQ ID NO: 152);
b. VSV N protein (SEQ ID NO: 155);
c. VSV P protein (SEQ ID NO: 156);
d. VSV M protein (SEQ ID NO: 151); and
e. SARS-CoV-2 S protein (SEQ ID NO: 153).

15. The recombinant VSV vector of claim 1, wherein the VSV-M protein comprises a Y61S mutation relative to SEQ ID NO: 1.

16. The recombinant VSV vector of claim 1, wherein the immunogenic variant of the SARS-CoV-2 S protein comprises one or more mutations relative to SEQ ID NO: 1 chosen from:
a. H655Y, R682K, and R685G;
b. H655Y, R682K, R685G, and a deletion of the 9 amino acids (Δ9) at the C-terminal end of the amino acid sequence of SEQ ID NO: 1;
c. H655Y, R682K, R685G, and a deletion of the 13 amino acids (Δ13) at the C-terminal end of the amino acid sequence of SEQ ID NO: 1;
d. Q321P, H655Y, T678I, and P812R;
e. Q321P, H655Y, T678I, P812R, and a deletion of the 23 amino acids (Δ23) at the C-terminal end of the amino acid sequence of SEQ ID NO: 1;
f. E154D, S115L, T678I, R685G, and M1233K;
g. R685G, S813R, and a deletion of the 9 amino acids (Δ9) at the C-terminal end of the amino acid sequence of SEQ ID NO: 1;
h. H655Y, R682K, and a deletion of the 13 amino acids (Δ13) at the C-terminal end of the amino acid sequence of SEQ ID NO: 1;
i. R685G, S813F, and a deletion of the 9 amino acids (Δ9) at the C-terminal end of the amino acid sequence of SEQ ID NO: 1;
j. R683G, S813F and a deletion of the 23 amino acids (Δ23) at the C-terminal end of the amino acid sequence of SEQ ID NO: 1;
k. R683G, S813F, R685G, and a deletion of 23 amino acids (Δ23) at the C-terminal end of the amino acid sequence of SEQ ID NO: 1;
l. H655Y, P681S, R682K, and a deletion of the 13 amino acids (Δ13) at the C-terminal end of the amino acid sequence of SEQ ID NO: 1;
m. R683G and a deletion of the 23 amino acids (Δ23) at the C-terminal end of the amino acid sequence of SEQ ID NO: 1;
n. H655Y and a deletion of the 23 amino acids (Δ23) at the C-terminal end of the amino acid sequence of SEQ ID NO: 1;
o. R683G, D1118A, and a deletion of the 23 amino acids (Δ23) at the C-terminal end of the amino acid sequence of SEQ ID NO: 1;
p. R683G, N715S, and a deletion of the 23 amino acids (Δ23) at the C-terminal end of the amino acid sequence of SEQ ID NO: 1;
q. H655Y, N709S, and a deletion of the 13 amino acids (Δ13) at the C-terminal end of the amino acid sequence of SEQ ID NO: 1;
r. F140V, H655Y, and a deletion of the 23 amino acids (Δ23) at the C-terminal end of the amino acid sequence of SEQ ID NO: 1;
s. a deletion of the 21 amino acids (Δ21) at the C-terminal end of the amino acid sequence of SEQ ID NO: 1;
t. a deletion of the 19 amino acids (Δ19) at the C-terminal end of the amino acid sequence of SEQ ID NO: 1;
u. E484D, H655Y, and a deletion of 21 amino acids (Δ21) at the C-terminal end of the amino acid sequence of SEQ ID NO: 1;
v. H665Y, R685G and a deletion of the 19 amino acids (Δ19) at the C-terminal end of the amino acid sequence of SEQ ID NO: 1, wherein the SARS-CoV-2 S protein further comprises a fragment of at least 21 amino acids at the C-terminal end of a VSV-G protein;
w. D614G; and
x. D614N.

17. The SARS-CoV-2 vaccine of claim 8, wherein the SARS-CoV-2 vaccine is formulated for oral administration.

18. The SARS-CoV-2 vaccine of claim 8, wherein the SARS-CoV-2 vaccine is formulated for intranasal administration.

19. The SARS-CoV-2 vaccine of claim 8, wherein the SARS-CoV-2 vaccine is formulated for oral mucosal administration and intranasal administration.

20. A method for producing a recombinant VSV particle, comprising
a. introducing the recombinant VSV vector of claim 1 into cells and
b. producing a recombinant VSV particle and optionally cells producing a recombinant S protein.

21. A recombinant cell comprising the recombinant VSV vector of claim 1.

22. A method of generating an immune response against SARS-CoV-2 comprising
a. administering to a subject an effective amount of the VSV vector of claim 1 and
b. generating an immune response to SARS-CoV-2.

23. The method of claim 22, wherein administering the recombinant VSV vector, recombinant VSV particle, immunogenic recombinant protein, or SARS-CoV-2 vaccine comprises intranasal administration.

24. The method of claim 22, wherein administering the recombinant VSV vector, recombinant VSV particle, immunogenic recombinant protein, or SARS-CoV-2 vaccine comprises oral administration.

25. The method of claim 22, wherein administering the recombinant VSV vector, recombinant VSV particle, immunogenic recombinant protein, or SARS-CoV-2 vaccine comprises oral mucosal administration.
